United States Patent Application Publication US 2026/0308594 A1, published October 8, 2026 (application 18/874,062).

The application's sequence listing, which the Patent Office published only in electronic form, follows.

SEQUENCE LISTING (13779 sequences)

SEQ ID NO: 1 - RNA, 19 nt, synthetic construct
  source 1..19: mol_type = other RNA
gcgccactgcagctggcat

SEQ ID NO: 2 - RNA, 19 nt, synthetic construct
  source 1..19: mol_type = other RNA
cgccactgcagctggcatt

SEQ ID NO: 3 - RNA, 19 nt, synthetic construct
  source 1..19: mol_type = other RNA
gccactgcagctggcattg

SEQ ID NO: 4 - RNA, 19 nt, synthetic construct
  source 1..19: mol_type = other RNA
ccactgcagctggcattgg

SEQ ID NO: 5 - RNA, 19 nt, synthetic construct
  source 1..19: mol_type = other RNA
cactgcagctggcattggc

SEQ ID NO: 6 - RNA, 19 nt, synthetic construct
  source 1..19: mol_type = other RNA
actgcagctggcattggcc

SEQ ID NO: 7 - RNA, 19 nt, synthetic construct
  source 1..19: mol_type = other RNA
ctgcagctggcattggccg

SEQ ID NO: 8 - RNA, 19 nt, synthetic construct
  source 1..19: mol_type = other RNA
tgcagctggcattggccgg

SEQ ID NO: 9 - RNA, 19 nt, synthetic construct
  source 1..19: mol_type = other RNA
gcagctggcattggccggg

SEQ ID NO: 10 - RNA, 19 nt, synthetic construct
  source 1..19: mol_type = other RNA
cagctggcattggccggga

SEQ ID NO: 11 - RNA, 19 nt, synthetic construct
  source 1..19: mol_type = other RNA
agctggcattggccgggac

SEQ ID NO: 12 - RNA, 19 nt, synthetic construct
  source 1..19: mol_type = other RNA
gctggcattggccgggact

SEQ ID NO: 13 - RNA, 19 nt, synthetic construct
  source 1..19: mol_type = other RNA
ctggcattggccgggactg

SEQ ID NO: 14 - RNA, 19 nt, synthetic construct
  source 1..19: mol_type = other RNA
tggcattggccgggactgg

SEQ ID NO: 15 - RNA, 19 nt, synthetic construct
  source 1..19: mol_type = other RNA
ggcattggccgggactgga

SEQ ID NO: 16 - RNA, 19 nt, synthetic construct
  source 1..19: mol_type = other RNA
gcattggccgggactggaa

SEQ ID NO: 17 - RNA, 19 nt, synthetic construct
  source 1..19: mol_type = other RNA
cattggccgggactggaag

SEQ ID NO: 18 - RNA, 19 nt, synthetic construct
  source 1..19: mol_type = other RNA
attggccgggactggaagt

SEQ ID NO: 19 - RNA, 19 nt, synthetic construct
  source 1..19: mol_type = other RNA
ttggccgggactggaagtg

SEQ ID NO: 20 - RNA, 19 nt, synthetic construct
  source 1..19: mol_type = other RNA
tggccgggactggaagtgc

SEQ ID NO: 21 - RNA, 19 nt, synthetic construct
  source 1..19: mol_type = other RNA
ggccgggactggaagtgcg

SEQ ID NO: 22 - RNA, 19 nt, synthetic construct
  source 1..19: mol_type = other RNA
gccgggactggaagtgcgg

SEQ ID NO: 23 - RNA, 19 nt, synthetic construct
  source 1..19: mol_type = other RNA
ccgggactggaagtgcggg

SEQ ID NO: 24 - RNA, 19 nt, synthetic construct
  source 1..19: mol_type = other RNA
cgggactggaagtgcgggc

SEQ ID NO: 25 - RNA, 19 nt, synthetic construct
  source 1..19: mol_type = other RNA
gggactggaagtgcgggct

SEQ ID NO: 26 - RNA, 19 nt, synthetic construct
  source 1..19: mol_type = other RNA
ggactggaagtgcgggctt

SEQ ID NO: 27 - RNA, 19 nt, synthetic construct
  source 1..19: mol_type = other RNA
gactggaagtgcgggcttc

SEQ ID NO: 28 - RNA, 19 nt, synthetic construct
  source 1..19: mol_type = other RNA
actggaagtgcgggcttct

SEQ ID NO: 29 - RNA, 19 nt, synthetic construct
  source 1..19: mol_type = other RNA
ctggaagtgcgggcttctg

SEQ ID NO: 30 - RNA, 19 nt, synthetic construct
  source 1..19: mol_type = other RNA
tggaagtgcgggcttctgc

SEQ ID NO: 31 - RNA, 19 nt, synthetic construct
  source 1..19: mol_type = other RNA
ggaagtgcgggcttctgca

SEQ ID NO: 32 - RNA, 19 nt, synthetic construct
  source 1..19: mol_type = other RNA
gaagtgcgggcttctgcag

SEQ ID NO: 33 - RNA, 19 nt, synthetic construct
  source 1..19: mol_type = other RNA
aagtgcgggcttctgcagc

SEQ ID NO: 34 - RNA, 19 nt, synthetic construct
  source 1..19: mol_type = other RNA
agtgcgggcttctgcagca

SEQ ID NO: 35 - RNA, 19 nt, synthetic construct
  source 1..19: mol_type = other RNA
gtgcgggcttctgcagcag

SEQ ID NO: 36 - RNA, 19 nt, synthetic construct
  source 1..19: mol_type = other RNA
tgcgggcttctgcagcagc

SEQ ID NO: 37 - RNA, 19 nt, synthetic construct
  source 1..19: mol_type = other RNA
gcgggcttctgcagcagcc

SEQ ID NO: 38 - RNA, 19 nt, synthetic construct
  source 1..19: mol_type = other RNA
cgggcttctgcagcagccg

SEQ ID NO: 39 - RNA, 19 nt, synthetic construct
  source 1..19: mol_type = other RNA
gggcttctgcagcagccga

SEQ ID NO: 40 - RNA, 19 nt, synthetic construct
  source 1..19: mol_type = other RNA
ggcttctgcagcagccgaa

SEQ ID NO: 41 - RNA, 19 nt, synthetic construct
  source 1..19: mol_type = other RNA
gcttctgcagcagccgaag

SEQ ID NO: 42 - RNA, 19 nt, synthetic construct
  source 1..19: mol_type = other RNA
cttctgcagcagccgaagc

SEQ ID NO: 43 - RNA, 19 nt, synthetic construct
  source 1..19: mol_type = other RNA
ttctgcagcagccgaagct

SEQ ID NO: 44 - RNA, 19 nt, synthetic construct
  source 1..19: mol_type = other RNA
tctgcagcagccgaagctg

SEQ ID NO: 45 - RNA, 19 nt, synthetic construct
  source 1..19: mol_type = other RNA
ctgcagcagccgaagctgg

SEQ ID NO: 46 - RNA, 19 nt, synthetic construct
  source 1..19: mol_type = other RNA
tgcagcagccgaagctgga

SEQ ID NO: 47 - RNA, 19 nt, synthetic construct
  source 1..19: mol_type = other RNA
gcagcagccgaagctggag

SEQ ID NO: 48 - RNA, 19 nt, synthetic construct
  source 1..19: mol_type = other RNA
cagcagccgaagctggagc

SEQ ID NO: 49 - RNA, 19 nt, synthetic construct
  source 1..19: mol_type = other RNA
agcagccgaagctggagct

SEQ ID NO: 50 - RNA, 19 nt, synthetic construct
  source 1..19: mol_type = other RNA
gcagccgaagctggagctg

SEQ ID NO: 51 - RNA, 19 nt, synthetic construct
  source 1..19: mol_type = other RNA
cagccgaagctggagctgc

SEQ ID NO: 52 - RNA, 19 nt, synthetic construct
  source 1..19: mol_type = other RNA
agccgaagctggagctgct

SEQ ID NO: 53 - RNA, 19 nt, synthetic construct
  source 1..19: mol_type = other RNA
gccgaagctggagctgcta

SEQ ID NO: 54 - RNA, 19 nt, synthetic construct
  source 1..19: mol_type = other RNA
ccgaagctggagctgctag

SEQ ID NO: 55 - RNA, 19 nt, synthetic construct
  source 1..19: mol_type = other RNA
cgaagctggagctgctagg

SEQ ID NO: 56 - RNA, 19 nt, synthetic construct
  source 1..19: mol_type = other RNA
gaagctggagctgctaggg

SEQ ID NO: 57 - RNA, 19 nt, synthetic construct
  source 1..19: mol_type = other RNA
aagctggagctgctagggc

SEQ ID NO: 58 - RNA, 19 nt, synthetic construct
  source 1..19: mol_type = other RNA
agctggagctgctagggca

SEQ ID NO: 59 - RNA, 19 nt, synthetic construct
  source 1..19: mol_type = other RNA
gctggagctgctagggcag

SEQ ID NO: 60 - RNA, 19 nt, synthetic construct
  source 1..19: mol_type = other RNA
ctggagctgctagggcagc

SEQ ID NO: 61 - RNA, 19 nt, synthetic construct
  source 1..19: mol_type = other RNA
tggagctgctagggcagca

SEQ ID NO: 62 - RNA, 19 nt, synthetic construct
  source 1..19: mol_type = other RNA
ggagctgctagggcagcag

SEQ ID NO: 63 - RNA, 19 nt, synthetic construct
  source 1..19: mol_type = other RNA
gagctgctagggcagcagc

SEQ ID NO: 64 - RNA, 19 nt, synthetic construct
  source 1..19: mol_type = other RNA
agctgctagggcagcagcg

SEQ ID NO: 65 - RNA, 19 nt, synthetic construct
  source 1..19: mol_type = other RNA
gctgctagggcagcagcgg

SEQ ID NO: 66 - RNA, 19 nt, synthetic construct
  source 1..19: mol_type = other RNA
ctgctagggcagcagcggc

SEQ ID NO: 67 - RNA, 19 nt, synthetic construct
  source 1..19: mol_type = other RNA
tgctagggcagcagcggct

SEQ ID NO: 68 - RNA, 19 nt, synthetic construct
  source 1..19: mol_type = other RNA
gctagggcagcagcggctc

SEQ ID NO: 69 - RNA, 19 nt, synthetic construct
  source 1..19: mol_type = other RNA
ctagggcagcagcggctcc

SEQ ID NO: 70 - RNA, 19 nt, synthetic construct
  source 1..19: mol_type = other RNA
tagggcagcagcggctccc

SEQ ID NO: 71 - RNA, 19 nt, synthetic construct
  source 1..19: mol_type = other RNA
agggcagcagcggctcccc

SEQ ID NO: 72 - RNA, 19 nt, synthetic construct
  source 1..19: mol_type = other RNA
gggcagcagcggctcccct

SEQ ID NO: 73 - RNA, 19 nt, synthetic construct
  source 1..19: mol_type = other RNA
ggcagcagcggctcccctg

SEQ ID NO: 74 - RNA, 19 nt, synthetic construct
  source 1..19: mol_type = other RNA
gcagcagcggctcccctgt

SEQ ID NO: 75 - RNA, 19 nt, synthetic construct
  source 1..19: mol_type = other RNA
cagcagcggctcccctgtt

SEQ ID NO: 76 - RNA, 19 nt, synthetic construct
  source 1..19: mol_type = other RNA
agcagcggctcccctgttg

SEQ ID NO: 77 - RNA, 19 nt, synthetic construct
  source 1..19: mol_type = other RNA
gcagcggctcccctgttgt

SEQ ID NO: 78 - RNA, 19 nt, synthetic construct
  source 1..19: mol_type = other RNA
cagcggctcccctgttgta

SEQ ID NO: 79 - RNA, 19 nt, synthetic construct
  source 1..19: mol_type = other RNA
agcggctcccctgttgtat

SEQ ID NO: 80 - RNA, 19 nt, synthetic construct
  source 1..19: mol_type = other RNA
gcggctcccctgttgtatg

SEQ ID NO: 81 - RNA, 19 nt, synthetic construct
  source 1..19: mol_type = other RNA
cggctcccctgttgtatgg

SEQ ID NO: 82 - RNA, 19 nt, synthetic construct
  source 1..19: mol_type = other RNA
ggctcccctgttgtatgga

SEQ ID NO: 83 - RNA, 19 nt, synthetic construct
  source 1..19: mol_type = other RNA
gctcccctgttgtatggac

SEQ ID NO: 84 - RNA, 19 nt, synthetic construct
  source 1..19: mol_type = other RNA
ctcccctgttgtatggaca

SEQ ID NO: 85 - RNA, 19 nt, synthetic construct
  source 1..19: mol_type = other RNA
tcccctgttgtatggacat

SEQ ID NO: 86 - RNA, 19 nt, synthetic construct
  source 1..19: mol_type = other RNA
cccctgttgtatggacatt

SEQ ID NO: 87 - RNA, 19 nt, synthetic construct
  source 1..19: mol_type = other RNA
ccctgttgtatggacattc

SEQ ID NO: 88 - RNA, 19 nt, synthetic construct
  source 1..19: mol_type = other RNA
cctgttgtatggacattct

SEQ ID NO: 89 - RNA, 19 nt, synthetic construct
  source 1..19: mol_type = other RNA
ctgttgtatggacattctg

SEQ ID NO: 90 - RNA, 19 nt, synthetic construct
  source 1..19: mol_type = other RNA
tgttgtatggacattctgc

SEQ ID NO: 91 - RNA, 19 nt, synthetic construct
  source 1..19: mol_type = other RNA
gttgtatggacattctgca

SEQ ID NO: 92 - RNA, 19 nt, synthetic construct
  source 1..19: mol_type = other RNA
ttgtatggacattctgcac

SEQ ID NO: 93 - RNA, 19 nt, synthetic construct
  source 1..19: mol_type = other RNA
tgtatggacattctgcacc

SEQ ID NO: 94 - RNA, 19 nt, synthetic construct
  source 1..19: mol_type = other RNA
gtatggacattctgcaccc

SEQ ID NO: 95 - RNA, 19 nt, synthetic construct
  source 1..19: mol_type = other RNA
tatggacattctgcacccg

SEQ ID NO: 96 - RNA, 19 nt, synthetic construct
  source 1..19: mol_type = other RNA
atggacattctgcacccga

SEQ ID NO: 97 - RNA, 19 nt, synthetic construct
  source 1..19: mol_type = other RNA
tggacattctgcacccgaa

SEQ ID NO: 98 - RNA, 19 nt, synthetic construct
  source 1..19: mol_type = other RNA
ggacattctgcacccgaaa

SEQ ID NO: 99 - RNA, 19 nt, synthetic construct
  source 1..19: mol_type = other RNA
gacattctgcacccgaaac

SEQ ID NO: 100 - RNA, 19 nt, synthetic construct
  source 1..19: mol_type = other RNA
acattctgcacccgaaact

SEQ ID NO: 101 - RNA, 19 nt, synthetic construct
  source 1..19: mol_type = other RNA
cattctgcacccgaaactg

SEQ ID NO: 102 - RNA, 19 nt, synthetic construct
  source 1..19: mol_type = other RNA
attctgcacccgaaactga

SEQ ID NO: 103 - RNA, 19 nt, synthetic construct
  source 1..19: mol_type = other RNA
ttctgcacccgaaactgat

SEQ ID NO: 104 - RNA, 19 nt, synthetic construct
  source 1..19: mol_type = other RNA
tctgcacccgaaactgata

SEQ ID NO: 105 - RNA, 19 nt, synthetic construct
  source 1..19: mol_type = other RNA
ctgcacccgaaactgatag

SEQ ID NO: 106 - RNA, 19 nt, synthetic construct
  source 1..19: mol_type = other RNA
tgcacccgaaactgatagc

SEQ ID NO: 107 - RNA, 19 nt, synthetic construct
  source 1..19: mol_type = other RNA
gcacccgaaactgatagct

SEQ ID NO: 108 - RNA, 19 nt, synthetic construct
  source 1..19: mol_type = other RNA
cacccgaaactgatagctg

SEQ ID NO: 109 - RNA, 19 nt, synthetic construct
  source 1..19: mol_type = other RNA
acccgaaactgatagctga

SEQ ID NO: 110 - RNA, 19 nt, synthetic construct
  source 1..19: mol_type = other RNA
cccgaaactgatagctgag

SEQ ID NO: 111 - RNA, 19 nt, synthetic construct
  source 1..19: mol_type = other RNA
ccgaaactgatagctgagt

SEQ ID NO: 112 - RNA, 19 nt, synthetic construct
  source 1..19: mol_type = other RNA
cgaaactgatagctgagtc

SEQ ID NO: 113 - RNA, 19 nt, synthetic construct
  source 1..19: mol_type = other RNA
gaaactgatagctgagtcc

SEQ ID NO: 114 - RNA, 19 nt, synthetic construct
  source 1..19: mol_type = other RNA
aaactgatagctgagtcct

SEQ ID NO: 115 - RNA, 19 nt, synthetic construct
  source 1..19: mol_type = other RNA
aactgatagctgagtcctg

SEQ ID NO: 116 - RNA, 19 nt, synthetic construct
  source 1..19: mol_type = other RNA
actgatagctgagtcctga

SEQ ID NO: 117 - RNA, 19 nt, synthetic construct
  source 1..19: mol_type = other RNA
ctgatagctgagtcctgaa

SEQ ID NO: 118 - RNA, 19 nt, synthetic construct
  source 1..19: mol_type = other RNA
tgatagctgagtcctgaag

SEQ ID NO: 119 - RNA, 19 nt, synthetic construct
  source 1..19: mol_type = other RNA
gatagctgagtcctgaagt

SEQ ID NO: 120 - RNA, 19 nt, synthetic construct
  source 1..19: mol_type = other RNA
atagctgagtcctgaagtt

SEQ ID NO: 121 - RNA, 19 nt, synthetic construct
  source 1..19: mol_type = other RNA
tagctgagtcctgaagttt

SEQ ID NO: 122 - RNA, 19 nt, synthetic construct
  source 1..19: mol_type = other RNA
agctgagtcctgaagtttt

SEQ ID NO: 123 - RNA, 19 nt, synthetic construct
  source 1..19: mol_type = other RNA
gctgagtcctgaagtttta

SEQ ID NO: 124 - RNA, 19 nt, synthetic construct
  source 1..19: mol_type = other RNA
ctgagtcctgaagttttat

SEQ ID NO: 125 - RNA, 19 nt, synthetic construct
  source 1..19: mol_type = other RNA
tgagtcctgaagttttatg

SEQ ID NO: 126 - RNA, 19 nt, synthetic construct
  source 1..19: mol_type = other RNA
gagtcctgaagttttatgt

SEQ ID NO: 127 - RNA, 19 nt, synthetic construct
  source 1..19: mol_type = other RNA
agtcctgaagttttatgtt

SEQ ID NO: 128 - RNA, 19 nt, synthetic construct
  source 1..19: mol_type = other RNA
gtcctgaagttttatgtta

SEQ ID NO: 129 - RNA, 19 nt, synthetic construct
  source 1..19: mol_type = other RNA
tcctgaagttttatgttat

SEQ ID NO: 130 - RNA, 19 nt, synthetic construct
  source 1..19: mol_type = other RNA
cctgaagttttatgttatg

SEQ ID NO: 131 - RNA, 19 nt, synthetic construct
  source 1..19: mol_type = other RNA
ctgaagttttatgttatga

SEQ ID NO: 132 - RNA, 19 nt, synthetic construct
  source 1..19: mol_type = other RNA
tgaagttttatgttatgaa

SEQ ID NO: 133 - RNA, 19 nt, synthetic construct
  source 1..19: mol_type = other RNA
gaagttttatgttatgaaa

SEQ ID NO: 134 - RNA, 19 nt, synthetic construct
  source 1..19: mol_type = other RNA
aagttttatgttatgaaac

SEQ ID NO: 135 - RNA, 19 nt, synthetic construct
  source 1..19: mol_type = other RNA
agttttatgttatgaaaca

SEQ ID NO: 136 - RNA, 19 nt, synthetic construct
  source 1..19: mol_type = other RNA
gttttatgttatgaaacag

SEQ ID NO: 137 - RNA, 19 nt, synthetic construct
  source 1..19: mol_type = other RNA
ttttatgttatgaaacaga

SEQ ID NO: 138 - RNA, 19 nt, synthetic construct
  source 1..19: mol_type = other RNA
tttatgttatgaaacagaa

SEQ ID NO: 139 - RNA, 19 nt, synthetic construct
  source 1..19: mol_type = other RNA
ttatgttatgaaacagaag

SEQ ID NO: 140 - RNA, 19 nt, synthetic construct
  source 1..19: mol_type = other RNA
tatgttatgaaacagaaga

SEQ ID NO: 141 - RNA, 19 nt, synthetic construct
  source 1..19: mol_type = other RNA
atgttatgaaacagaagaa

SEQ ID NO: 142 - RNA, 19 nt, synthetic construct
  source 1..19: mol_type = other RNA
tgttatgaaacagaagaac

SEQ ID NO: 143 - RNA, 19 nt, synthetic construct
  source 1..19: mol_type = other RNA
gttatgaaacagaagaact

SEQ ID NO: 144 - RNA, 19 nt, synthetic construct
  source 1..19: mol_type = other RNA
ttatgaaacagaagaactt

SEQ ID NO: 145 - RNA, 19 nt, synthetic construct
  source 1..19: mol_type = other RNA
tatgaaacagaagaacttt

SEQ ID NO: 146 - RNA, 19 nt, synthetic construct
  source 1..19: mol_type = other RNA
atgaaacagaagaactttc

SEQ ID NO: 147 - RNA, 19 nt, synthetic construct
  source 1..19: mol_type = other RNA
tgaaacagaagaactttca

SEQ ID NO: 148 - RNA, 19 nt, synthetic construct
  source 1..19: mol_type = other RNA
gaaacagaagaactttcat

SEQ ID NO: 149 - RNA, 19 nt, synthetic construct
  source 1..19: mol_type = other RNA
aaacagaagaactttcatc

SEQ ID NO: 150 - RNA, 19 nt, synthetic construct
  source 1..19: mol_type = other RNA
aacagaagaactttcatcc

SEQ ID NO: 151 - RNA, 19 nt, synthetic construct
  source 1..19: mol_type = other RNA
acagaagaactttcatccc

SEQ ID NO: 152 - RNA, 19 nt, synthetic construct
  source 1..19: mol_type = other RNA
cagaagaactttcatccca

SEQ ID NO: 153 - RNA, 19 nt, synthetic construct
  source 1..19: mol_type = other RNA
agaagaactttcatcccag

SEQ ID NO: 154 - RNA, 19 nt, synthetic construct
  source 1..19: mol_type = other RNA
gaagaactttcatcccagc

SEQ ID NO: 155 - RNA, 19 nt, synthetic construct
  source 1..19: mol_type = other RNA
aagaactttcatcccagca

SEQ ID NO: 156 - RNA, 19 nt, synthetic construct
  source 1..19: mol_type = other RNA
agaactttcatcccagcac

SEQ ID NO: 157 - RNA, 19 nt, synthetic construct
  source 1..19: mol_type = other RNA
gaactttcatcccagcaca

SEQ ID NO: 158 - RNA, 19 nt, synthetic construct
  source 1..19: mol_type = other RNA
aactttcatcccagcacat

SEQ ID NO: 159 - RNA, 19 nt, synthetic construct
  source 1..19: mol_type = other RNA
actttcatcccagcacatg

SEQ ID NO: 160 - RNA, 19 nt, synthetic construct
  source 1..19: mol_type = other RNA
ctttcatcccagcacatga

SEQ ID NO: 161 - RNA, 19 nt, synthetic construct
  source 1..19: mol_type = other RNA
tttcatcccagcacatgat

SEQ ID NO: 162 - RNA, 19 nt, synthetic construct
  source 1..19: mol_type = other RNA
ttcatcccagcacatgatt

SEQ ID NO: 163 - RNA, 19 nt, synthetic construct
  source 1..19: mol_type = other RNA
tcatcccagcacatgattt

SEQ ID NO: 164 - RNA, 19 nt, synthetic construct
  source 1..19: mol_type = other RNA
catcccagcacatgatttg

SEQ ID NO: 165 - RNA, 19 nt, synthetic construct
  source 1..19: mol_type = other RNA
atcccagcacatgatttgg

SEQ ID NO: 166 - RNA, 19 nt, synthetic construct
  source 1..19: mol_type = other RNA
tcccagcacatgatttggg

SEQ ID NO: 167 - RNA, 19 nt, synthetic construct
  source 1..19: mol_type = other RNA
cccagcacatgatttggga

SEQ ID NO: 168 - RNA, 19 nt, synthetic construct
  source 1..19: mol_type = other RNA
ccagcacatgatttgggaa

SEQ ID NO: 169 - RNA, 19 nt, synthetic construct
  source 1..19: mol_type = other RNA
cagcacatgatttgggaat

SEQ ID NO: 170 - RNA, 19 nt, synthetic construct
  source 1..19: mol_type = other RNA
agcacatgatttgggaatt

SEQ ID NO: 171 - RNA, 19 nt, synthetic construct
  source 1..19: mol_type = other RNA
gcacatgatttgggaatta

SEQ ID NO: 172 - RNA, 19 nt, synthetic construct
  source 1..19: mol_type = other RNA
cacatgatttgggaattac

SEQ ID NO: 173 - RNA, 19 nt, synthetic construct
  source 1..19: mol_type = other RNA
acatgatttgggaattaca

SEQ ID NO: 174 - RNA, 19 nt, synthetic construct
  source 1..19: mol_type = other RNA
catgatttgggaattacac

SEQ ID NO: 175 - RNA, 19 nt, synthetic construct
  source 1..19: mol_type = other RNA
atgatttgggaattacact

SEQ ID NO: 176 - RNA, 19 nt, synthetic construct
  source 1..19: mol_type = other RNA
tgatttgggaattacactt

SEQ ID NO: 177 - RNA, 19 nt, synthetic construct
  source 1..19: mol_type = other RNA
gatttgggaattacacttt

SEQ ID NO: 178 - RNA, 19 nt, synthetic construct
  source 1..19: mol_type = other RNA
atttgggaattacactttg

SEQ ID NO: 179 - RNA, 19 nt, synthetic construct
  source 1..19: mol_type = other RNA
tttgggaattacactttgt

SEQ ID NO: 180 - RNA, 19 nt, synthetic construct
  source 1..19: mol_type = other RNA
ttgggaattacactttgtg

SEQ ID NO: 181 - RNA, 19 nt, synthetic construct
  source 1..19: mol_type = other RNA
tgggaattacactttgtga

SEQ ID NO: 182 - RNA, 19 nt, synthetic construct
  source 1..19: mol_type = other RNA
gggaattacactttgtgac

SEQ ID NO: 183 - RNA, 19 nt, synthetic construct
  source 1..19: mol_type = other RNA
ggaattacactttgtgaca

SEQ ID NO: 184 - RNA, 19 nt, synthetic construct
  source 1..19: mol_type = other RNA
gaattacactttgtgacat

SEQ ID NO: 185 - RNA, 19 nt, synthetic construct
  source 1..19: mol_type = other RNA
aattacactttgtgacatg

SEQ ID NO: 186 - RNA, 19 nt, synthetic construct
  source 1..19: mol_type = other RNA
attacactttgtgacatgg

SEQ ID NO: 187 - RNA, 19 nt, synthetic construct
  source 1..19: mol_type = other RNA
ttacactttgtgacatgga

SEQ ID NO: 188 - RNA, 19 nt, synthetic construct
  source 1..19: mol_type = other RNA
tacactttgtgacatggat

SEQ ID NO: 189 - RNA, 19 nt, synthetic construct
  source 1..19: mol_type = other RNA
acactttgtgacatggatg

SEQ ID NO: 190 - RNA, 19 nt, synthetic construct
  source 1..19: mol_type = other RNA
cactttgtgacatggatga

SEQ ID NO: 191 - RNA, 19 nt, synthetic construct
  source 1..19: mol_type = other RNA
actttgtgacatggatgaa

SEQ ID NO: 192 - RNA, 19 nt, synthetic construct
  source 1..19: mol_type = other RNA
ctttgtgacatggatgaat

SEQ ID NO: 193 - RNA, 19 nt, synthetic construct
  source 1..19: mol_type = other RNA
tttgtgacatggatgaatc

SEQ ID NO: 194 - RNA, 19 nt, synthetic construct
  source 1..19: mol_type = other RNA
ttgtgacatggatgaatct

SEQ ID NO: 195 - RNA, 19 nt, synthetic construct
  source 1..19: mol_type = other RNA
tgtgacatggatgaatctg

SEQ ID NO: 196 - RNA, 19 nt, synthetic construct
  source 1..19: mol_type = other RNA
gtgacatggatgaatctgc

SEQ ID NO: 197 - RNA, 19 nt, synthetic construct
  source 1..19: mol_type = other RNA
tgacatggatgaatctgca

SEQ ID NO: 198 - RNA, 19 nt, synthetic construct
  source 1..19: mol_type = other RNA
gacatggatgaatctgcac

SEQ ID NO: 199 - RNA, 19 nt, synthetic construct
  source 1..19: mol_type = other RNA
acatggatgaatctgcact

SEQ ID NO: 200 - RNA, 19 nt, synthetic construct
  source 1..19: mol_type = other RNA
catggatgaatctgcactg

SEQ ID NO: 201 - RNA, 19 nt, synthetic construct
  source 1..19: mol_type = other RNA
atggatgaatctgcactga

SEQ ID NO: 202 - RNA, 19 nt, synthetic construct
  source 1..19: mol_type = other RNA
tggatgaatctgcactgac

SEQ ID NO: 203 - RNA, 19 nt, synthetic construct
  source 1..19: mol_type = other RNA
ggatgaatctgcactgacc

SEQ ID NO: 204 - RNA, 19 nt, synthetic construct
  source 1..19: mol_type = other RNA
gatgaatctgcactgaccc

SEQ ID NO: 205 - RNA, 19 nt, synthetic construct
  source 1..19: mol_type = other RNA
atgaatctgcactgaccct

SEQ ID NO: 206 - RNA, 19 nt, synthetic construct
  source 1..19: mol_type = other RNA
tgaatctgcactgaccctt

SEQ ID NO: 207 - RNA, 19 nt, synthetic construct
  source 1..19: mol_type = other RNA
gaatctgcactgacccttg

SEQ ID NO: 208 - RNA, 19 nt, synthetic construct
  source 1..19: mol_type = other RNA
aatctgcactgacccttgg

SEQ ID NO: 209 - RNA, 19 nt, synthetic construct
  source 1..19: mol_type = other RNA
atctgcactgacccttggt

SEQ ID NO: 210 - RNA, 19 nt, synthetic construct
  source 1..19: mol_type = other RNA
tctgcactgacccttggta

SEQ ID NO: 211 - RNA, 19 nt, synthetic construct
  source 1..19: mol_type = other RNA
ctgcactgacccttggtac

SEQ ID NO: 212 - RNA, 19 nt, synthetic construct
  source 1..19: mol_type = other RNA
tgcactgacccttggtaca

SEQ ID NO: 213 - RNA, 19 nt, synthetic construct
  source 1..19: mol_type = other RNA
gcactgacccttggtacaa

SEQ ID NO: 214 - RNA, 19 nt, synthetic construct
  source 1..19: mol_type = other RNA
cactgacccttggtacaat

SEQ ID NO: 215 - RNA, 19 nt, synthetic construct
  source 1..19: mol_type = other RNA
actgacccttggtacaata

SEQ ID NO: 216 - RNA, 19 nt, synthetic construct
  source 1..19: mol_type = other RNA
ctgacccttggtacaatag

SEQ ID NO: 217 - RNA, 19 nt, synthetic construct
  source 1..19: mol_type = other RNA
tgacccttggtacaataga

SEQ ID NO: 218 - RNA, 19 nt, synthetic construct
  source 1..19: mol_type = other RNA
gacccttggtacaatagat

SEQ ID NO: 219 - RNA, 19 nt, synthetic construct
  source 1..19: mol_type = other RNA
acccttggtacaatagatg

SEQ ID NO: 220 - RNA, 19 nt, synthetic construct
  source 1..19: mol_type = other RNA
cccttggtacaatagatgt

SEQ ID NO: 221 - RNA, 19 nt, synthetic construct
  source 1..19: mol_type = other RNA
ccttggtacaatagatgtt

SEQ ID NO: 222 - RNA, 19 nt, synthetic construct
  source 1..19: mol_type = other RNA
cttggtacaatagatgttt

SEQ ID NO: 223 - RNA, 19 nt, synthetic construct
  source 1..19: mol_type = other RNA
ttggtacaatagatgtttc

SEQ ID NO: 224 - RNA, 19 nt, synthetic construct
  source 1..19: mol_type = other RNA
tggtacaatagatgtttct

SEQ ID NO: 225 - RNA, 19 nt, synthetic construct
  source 1..19: mol_type = other RNA
ggtacaatagatgtttctt

SEQ ID NO: 226 - RNA, 19 nt, synthetic construct
  source 1..19: mol_type = other RNA
gtacaatagatgtttctta

SEQ ID NO: 227 - RNA, 19 nt, synthetic construct
  source 1..19: mol_type = other RNA
tacaatagatgtttcttat

SEQ ID NO: 228 - RNA, 19 nt, synthetic construct
  source 1..19: mol_type = other RNA
acaatagatgtttcttatc

SEQ ID NO: 229 - RNA, 19 nt, synthetic construct
  source 1..19: mol_type = other RNA
caatagatgtttcttatct

SEQ ID NO: 230 - RNA, 19 nt, synthetic construct
  source 1..19: mol_type = other RNA
aatagatgtttcttatctg

SEQ ID NO: 231 - RNA, 19 nt, synthetic construct
  source 1..19: mol_type = other RNA
atagatgtttcttatctgc

SEQ ID NO: 232 - RNA, 19 nt, synthetic construct
  source 1..19: mol_type = other RNA
tagatgtttcttatctgcc

SEQ ID NO: 233 - RNA, 19 nt, synthetic construct
  source 1..19: mol_type = other RNA
agatgtttcttatctgcca

SEQ ID NO: 234 - RNA, 19 nt, synthetic construct
  source 1..19: mol_type = other RNA
gatgtttcttatctgccac

SEQ ID NO: 235 - RNA, 19 nt, synthetic construct
  source 1..19: mol_type = other RNA
atgtttcttatctgccaca

SEQ ID NO: 236 - RNA, 19 nt, synthetic construct
  source 1..19: mol_type = other RNA
tgtttcttatctgccacat

SEQ ID NO: 237 - RNA, 19 nt, synthetic construct
  source 1..19: mol_type = other RNA
gtttcttatctgccacatt

SEQ ID NO: 238 - RNA, 19 nt, synthetic construct
  source 1..19: mol_type = other RNA
tttcttatctgccacattc

SEQ ID NO: 239 - RNA, 19 nt, synthetic construct
  source 1..19: mol_type = other RNA
ttcttatctgccacattca

SEQ ID NO: 240 - RNA, 19 nt, synthetic construct
  source 1..19: mol_type = other RNA
tcttatctgccacattcat

SEQ ID NO: 241 - RNA, 19 nt, synthetic construct
  source 1..19: mol_type = other RNA
cttatctgccacattcatc

SEQ ID NO: 242 - RNA, 19 nt, synthetic construct
  source 1..19: mol_type = other RNA
ttatctgccacattcatca

SEQ ID NO: 243 - RNA, 19 nt, synthetic construct
  source 1..19: mol_type = other RNA
tatctgccacattcatcag

SEQ ID NO: 244 - RNA, 19 nt, synthetic construct
  source 1..19: mol_type = other RNA
atctgccacattcatcaga

SEQ ID NO: 245 - RNA, 19 nt, synthetic construct
  source 1..19: mol_type = other RNA
tctgccacattcatcagaa

SEQ ID NO: 246 - RNA, 19 nt, synthetic construct
  source 1..19: mol_type = other RNA
ctgccacattcatcagaat

SEQ ID NO: 247 - RNA, 19 nt, synthetic construct
  source 1..19: mol_type = other RNA
tgccacattcatcagaata

SEQ ID NO: 248 - RNA, 19 nt, synthetic construct
  source 1..19: mol_type = other RNA
gccacattcatcagaatac

SEQ ID NO: 249 - RNA, 19 nt, synthetic construct
  source 1..19: mol_type = other RNA
ccacattcatcagaataca

SEQ ID NO: 250 - RNA, 19 nt, synthetic construct
  source 1..19: mol_type = other RNA
cacattcatcagaatacag

SEQ ID NO: 251 - RNA, 19 nt, synthetic construct
  source 1..19: mol_type = other RNA
acattcatcagaatacagt

SEQ ID NO: 252 - RNA, 19 nt, synthetic construct
  source 1..19: mol_type = other RNA
cattcatcagaatacagtg

SEQ ID NO: 253 - RNA, 19 nt, synthetic construct
  source 1..19: mol_type = other RNA
attcatcagaatacagtgt

SEQ ID NO: 254 - RNA, 19 nt, synthetic construct
  source 1..19: mol_type = other RNA
ttcatcagaatacagtgtt

SEQ ID NO: 255 - RNA, 19 nt, synthetic construct
  source 1..19: mol_type = other RNA
tcatcagaatacagtgttg

SEQ ID NO: 256 - RNA, 19 nt, synthetic construct
  source 1..19: mol_type = other RNA
catcagaatacagtgttgg

SEQ ID NO: 257 - RNA, 19 nt, synthetic construct
  source 1..19: mol_type = other RNA
atcagaatacagtgttggt

SEQ ID NO: 258 - RNA, 19 nt, synthetic construct
  source 1..19: mol_type = other RNA
tcagaatacagtgttggtc

SEQ ID NO: 259 - RNA, 19 nt, synthetic construct
  source 1..19: mol_type = other RNA
cagaatacagtgttggtcg

SEQ ID NO: 260 - RNA, 19 nt, synthetic construct
  source 1..19: mol_type = other RNA
agaatacagtgttggtcga

SEQ ID NO: 261 - RNA, 19 nt, synthetic construct
  source 1..19: mol_type = other RNA
gaatacagtgttggtcgat

SEQ ID NO: 262 - RNA, 19 nt, synthetic construct
  source 1..19: mol_type = other RNA
aatacagtgttggtcgatg

SEQ ID NO: 263 - RNA, 19 nt, synthetic construct
  source 1..19: mol_type = other RNA
atacagtgttggtcgatgt

SEQ ID NO: 264 - RNA, 19 nt, synthetic construct
  source 1..19: mol_type = other RNA
tacagtgttggtcgatgta

SEQ ID NO: 265 - RNA, 19 nt, synthetic construct
  source 1..19: mol_type = other RNA
acagtgttggtcgatgtaa

SEQ ID NO: 266 - RNA, 19 nt, synthetic construct
  source 1..19: mol_type = other RNA
cagtgttggtcgatgtaag

SEQ ID NO: 267 - RNA, 19 nt, synthetic construct
  source 1..19: mol_type = other RNA
agtgttggtcgatgtaagc

SEQ ID NO: 268 - RNA, 19 nt, synthetic construct
  source 1..19: mol_type = other RNA
gtgttggtcgatgtaagca

SEQ ID NO: 269 - RNA, 19 nt, synthetic construct
  source 1..19: mol_type = other RNA
tgttggtcgatgtaagcac

SEQ ID NO: 270 - RNA, 19 nt, synthetic construct
  source 1..19: mol_type = other RNA
gttggtcgatgtaagcaca

SEQ ID NO: 271 - RNA, 19 nt, synthetic construct
  source 1..19: mol_type = other RNA
ttggtcgatgtaagcacac

SEQ ID NO: 272 - RNA, 19 nt, synthetic construct
  source 1..19: mol_type = other RNA
tggtcgatgtaagcacaca

SEQ ID NO: 273 - RNA, 19 nt, synthetic construct
  source 1..19: mol_type = other RNA
ggtcgatgtaagcacacaa

SEQ ID NO: 274 - RNA, 19 nt, synthetic construct
  source 1..19: mol_type = other RNA
gtcgatgtaagcacacaag

SEQ ID NO: 275 - RNA, 19 nt, synthetic construct
  source 1..19: mol_type = other RNA
tcgatgtaagcacacaagt

SEQ ID NO: 276 - RNA, 19 nt, synthetic construct
  source 1..19: mol_type = other RNA
cgatgtaagcacacaagtg

SEQ ID NO: 277 - RNA, 19 nt, synthetic construct
  source 1..19: mol_type = other RNA
gatgtaagcacacaagtga

SEQ ID NO: 278 - RNA, 19 nt, synthetic construct
  source 1..19: mol_type = other RNA
atgtaagcacacaagtgag

SEQ ID NO: 279 - RNA, 19 nt, synthetic construct
  source 1..19: mol_type = other RNA
tgtaagcacacaagtgagg

SEQ ID NO: 280 - RNA, 19 nt, synthetic construct
  source 1..19: mol_type = other RNA
gtaagcacacaagtgagga

SEQ ID NO: 281 - RNA, 19 nt, synthetic construct
  source 1..19: mol_type = other RNA
taagcacacaagtgaggaa

SEQ ID NO: 282 - RNA, 19 nt, synthetic construct
  source 1..19: mol_type = other RNA
aagcacacaagtgaggaat

SEQ ID NO: 283 - RNA, 19 nt, synthetic construct
  source 1..19: mol_type = other RNA
agcacacaagtgaggaatg

SEQ ID NO: 284 - RNA, 19 nt, synthetic construct
  source 1..19: mol_type = other RNA
gcacacaagtgaggaatgg

SEQ ID NO: 285 - RNA, 19 nt, synthetic construct
  source 1..19: mol_type = other RNA
cacacaagtgaggaatggg

SEQ ID NO: 286 - RNA, 19 nt, synthetic construct
  source 1..19: mol_type = other RNA
acacaagtgaggaatgggg

SEQ ID NO: 287 - RNA, 19 nt, synthetic construct
  source 1..19: mol_type = other RNA
cacaagtgaggaatggggt

SEQ ID NO: 288 - RNA, 19 nt, synthetic construct
  source 1..19: mol_type = other RNA
acaagtgaggaatggggtg

SEQ ID NO: 289 - RNA, 19 nt, synthetic construct
  source 1..19: mol_type = other RNA
caagtgaggaatggggtga

SEQ ID NO: 290 - RNA, 19 nt, synthetic construct
  source 1..19: mol_type = other RNA
aagtgaggaatggggtgag

SEQ ID NO: 291 - RNA, 19 nt, synthetic construct
  source 1..19: mol_type = other RNA
agtgaggaatggggtgagt

SEQ ID NO: 292 - RNA, 19 nt, synthetic construct
  source 1..19: mol_type = other RNA
gtgaggaatggggtgagtg

SEQ ID NO: 293 - RNA, 19 nt, synthetic construct
  source 1..19: mol_type = other RNA
tgaggaatggggtgagtgt

SEQ ID NO: 294 - RNA, 19 nt, synthetic construct
  source 1..19: mol_type = other RNA
gaggaatggggtgagtgtg

SEQ ID NO: 295 - RNA, 19 nt, synthetic construct
  source 1..19: mol_type = other RNA
aggaatggggtgagtgtgg

SEQ ID NO: 296 - RNA, 19 nt, synthetic construct
  source 1..19: mol_type = other RNA
ggaatggggtgagtgtggc

SEQ ID NO: 297 - RNA, 19 nt, synthetic construct
  source 1..19: mol_type = other RNA
gaatggggtgagtgtggct

SEQ ID NO: 298 - RNA, 19 nt, synthetic construct
  source 1..19: mol_type = other RNA
aatggggtgagtgtggctt

SEQ ID NO: 299 - RNA, 19 nt, synthetic construct
  source 1..19: mol_type = other RNA
atggggtgagtgtggcttt

SEQ ID NO: 300 - RNA, 19 nt, synthetic construct
  source 1..19: mol_type = other RNA
tggggtgagtgtggcttta

SEQ ID NO: 301 - RNA, 19 nt, synthetic construct
  source 1..19: mol_type = other RNA
ggggtgagtgtggctttag

SEQ ID NO: 302 - RNA, 19 nt, synthetic construct
  source 1..19: mol_type = other RNA
gggtgagtgtggctttaga

SEQ ID NO: 303 - RNA, 19 nt, synthetic construct
  source 1..19: mol_type = other RNA
ggtgagtgtggctttagac

SEQ ID NO: 304 - RNA, 19 nt, synthetic construct
  source 1..19: mol_type = other RNA
gtgagtgtggctttagacc

SEQ ID NO: 305 - RNA, 19 nt, synthetic construct
  source 1..19: mol_type = other RNA
tgagtgtggctttagaccc

SEQ ID NO: 306 - RNA, 19 nt, synthetic construct
  source 1..19: mol_type = other RNA
gagtgtggctttagaccca

SEQ ID NO: 307 - RNA, 19 nt, synthetic construct
  source 1..19: mol_type = other RNA
agtgtggctttagacccac

SEQ ID NO: 308 - RNA, 19 nt, synthetic construct
  source 1..19: mol_type = other RNA
gtgtggctttagacccacc

SEQ ID NO: 309 - RNA, 19 nt, synthetic construct
  source 1..19: mol_type = other RNA
tgtggctttagacccacca

SEQ ID NO: 310 - RNA, 19 nt, synthetic construct
  source 1..19: mol_type = other RNA
gtggctttagacccaccat

SEQ ID NO: 311 - RNA, 19 nt, synthetic construct
  source 1..19: mol_type = other RNA
tggctttagacccaccatc

SEQ ID NO: 312 - RNA, 19 nt, synthetic construct
  source 1..19: mol_type = other RNA
ggctttagacccaccatct

SEQ ID NO: 313 - RNA, 19 nt, synthetic construct
  source 1..19: mol_type = other RNA
gctttagacccaccatctt

SEQ ID NO: 314 - RNA, 19 nt, synthetic construct
  source 1..19: mol_type = other RNA
ctttagacccaccatcttc

SEQ ID NO: 315 - RNA, 19 nt, synthetic construct
  source 1..19: mol_type = other RNA
tttagacccaccatcttca

SEQ ID NO: 316 - RNA, 19 nt, synthetic construct
  source 1..19: mol_type = other RNA
ttagacccaccatcttcag

SEQ ID NO: 317 - RNA, 19 nt, synthetic construct
  source 1..19: mol_type = other RNA
tagacccaccatcttcaga

SEQ ID NO: 318 - RNA, 19 nt, synthetic construct
  source 1..19: mol_type = other RNA
agacccaccatcttcagat

SEQ ID NO: 319 - RNA, 19 nt, synthetic construct
  source 1..19: mol_type = other RNA
gacccaccatcttcagatc

SEQ ID NO: 320 - RNA, 19 nt, synthetic construct
  source 1..19: mol_type = other RNA
acccaccatcttcagatct

SEQ ID NO: 321 - RNA, 19 nt, synthetic construct
  source 1..19: mol_type = other RNA
cccaccatcttcagatctg

SEQ ID NO: 322 - RNA, 19 nt, synthetic construct
  source 1..19: mol_type = other RNA
ccaccatcttcagatctgc

SEQ ID NO: 323 - RNA, 19 nt, synthetic construct
  source 1..19: mol_type = other RNA
caccatcttcagatctgca

SEQ ID NO: 324 - RNA, 19 nt, synthetic construct
  source 1..19: mol_type = other RNA
accatcttcagatctgcaa

SEQ ID NO: 325 - RNA, 19 nt, synthetic construct
  source 1..19: mol_type = other RNA
ccatcttcagatctgcaac

SEQ ID NO: 326 - RNA, 19 nt, synthetic construct
  source 1..19: mol_type = other RNA
catcttcagatctgcaact

SEQ ID NO: 327 - RNA, 19 nt, synthetic construct
  source 1..19: mol_type = other RNA
atcttcagatctgcaactt

SEQ ID NO: 328 - RNA, 19 nt, synthetic construct
  source 1..19: mol_type = other RNA
tcttcagatctgcaacttt

SEQ ID NO: 329 - RNA, 19 nt, synthetic construct
  source 1..19: mol_type = other RNA
cttcagatctgcaacttta

SEQ ID NO: 330 - RNA, 19 nt, synthetic construct
  source 1..19: mol_type = other RNA
ttcagatctgcaactttaa

SEQ ID NO: 331 - RNA, 19 nt, synthetic construct
  source 1..19: mol_type = other RNA
tcagatctgcaactttaaa

SEQ ID NO: 332 - RNA, 19 nt, synthetic construct
  source 1..19: mol_type = other RNA
cagatctgcaactttaaaa

SEQ ID NO: 333 - RNA, 19 nt, synthetic construct
  source 1..19: mol_type = other RNA
agatctgcaactttaaaat

SEQ ID NO: 334 - RNA, 19 nt, synthetic construct
  source 1..19: mol_type = other RNA
gatctgcaactttaaaatg

SEQ ID NO: 335 - RNA, 19 nt, synthetic construct
  source 1..19: mol_type = other RNA
atctgcaactttaaaatgg

SEQ ID NO: 336 - RNA, 19 nt, synthetic construct
  source 1..19: mol_type = other RNA
tctgcaactttaaaatgga

SEQ ID NO: 337 - RNA, 19 nt, synthetic construct
  source 1..19: mol_type = other RNA
ctgcaactttaaaatggaa

SEQ ID NO: 338 - RNA, 19 nt, synthetic construct
  source 1..19: mol_type = other RNA
tgcaactttaaaatggaaa

SEQ ID NO: 339 - RNA, 19 nt, synthetic construct
  source 1..19: mol_type = other RNA
gcaactttaaaatggaaag

SEQ ID NO: 340 - RNA, 19 nt, synthetic construct
  source 1..19: mol_type = other RNA
caactttaaaatggaaaga

SEQ ID NO: 341 - RNA, 19 nt, synthetic construct
  source 1..19: mol_type = other RNA
aactttaaaatggaaagaa

SEQ ID NO: 342 - RNA, 19 nt, synthetic construct
  source 1..19: mol_type = other RNA
actttaaaatggaaagaaa

SEQ ID NO: 343 - RNA, 19 nt, synthetic construct
  source 1..19: mol_type = other RNA
ctttaaaatggaaagaaag

SEQ ID NO: 344 - RNA, 19 nt, synthetic construct
  source 1..19: mol_type = other RNA
tttaaaatggaaagaaagc

SEQ ID NO: 345 - RNA, 19 nt, synthetic construct
  source 1..19: mol_type = other RNA
ttaaaatggaaagaaagcc

SEQ ID NO: 346 - RNA, 19 nt, synthetic construct
  source 1..19: mol_type = other RNA
taaaatggaaagaaagcct

SEQ ID NO: 347 - RNA, 19 nt, synthetic construct
  source 1..19: mol_type = other RNA
aaaatggaaagaaagccta

SEQ ID NO: 348 - RNA, 19 nt, synthetic construct
  source 1..19: mol_type = other RNA
aaatggaaagaaagcctaa

SEQ ID NO: 349 - RNA, 19 nt, synthetic construct
  source 1..19: mol_type = other RNA
aatggaaagaaagcctaat

SEQ ID NO: 350 - RNA, 19 nt, synthetic construct
  source 1..19: mol_type = other RNA
atggaaagaaagcctaatg

SEQ ID NO: 351 - RNA, 19 nt, synthetic construct
  source 1..19: mol_type = other RNA
tggaaagaaagcctaatga

SEQ ID NO: 352 - RNA, 19 nt, synthetic construct
  source 1..19: mol_type = other RNA
ggaaagaaagcctaatgag

SEQ ID NO: 353 - RNA, 19 nt, synthetic construct
  source 1..19: mol_type = other RNA
gaaagaaagcctaatgagt

SEQ ID NO: 354 - RNA, 19 nt, synthetic construct
  source 1..19: mol_type = other RNA
aaagaaagcctaatgagtc

SEQ ID NO: 355 - RNA, 19 nt, synthetic construct
  source 1..19: mol_type = other RNA
aagaaagcctaatgagtcg

SEQ ID NO: 356 - RNA, 19 nt, synthetic construct
  source 1..19: mol_type = other RNA
agaaagcctaatgagtcgg

SEQ ID NO: 357 - RNA, 19 nt, synthetic construct
  source 1..19: mol_type = other RNA
gaaagcctaatgagtcgga

SEQ ID NO: 358 - RNA, 19 nt, synthetic construct
  source 1..19: mol_type = other RNA
aaagcctaatgagtcggaa

SEQ ID NO: 359 - RNA, 19 nt, synthetic construct
  source 1..19: mol_type = other RNA
aagcctaatgagtcggaaa

SEQ ID NO: 360 - RNA, 19 nt, synthetic construct
  source 1..19: mol_type = other RNA
agcctaatgagtcggaaaa

SEQ ID NO: 361 - RNA, 19 nt, synthetic construct
  source 1..19: mol_type = other RNA
gcctaatgagtcggaaaag

SEQ ID NO: 362 - RNA, 19 nt, synthetic construct
  source 1..19: mol_type = other RNA
cctaatgagtcggaaaagg

SEQ ID NO: 363 - RNA, 19 nt, synthetic construct
  source 1..19: mol_type = other RNA
ctaatgagtcggaaaaggc

SEQ ID NO: 364 - RNA, 19 nt, synthetic construct
  source 1..19: mol_type = other RNA
taatgagtcggaaaaggcc

SEQ ID NO: 365 - RNA, 19 nt, synthetic construct
  source 1..19: mol_type = other RNA
aatgagtcggaaaaggcca

SEQ ID NO: 366 - RNA, 19 nt, synthetic construct
  source 1..19: mol_type = other RNA
atgagtcggaaaaggccat

SEQ ID NO: 367 - RNA, 19 nt, synthetic construct
  source 1..19: mol_type = other RNA
tgagtcggaaaaggccatt

SEQ ID NO: 368 - RNA, 19 nt, synthetic construct
  source 1..19: mol_type = other RNA
gagtcggaaaaggccattt

SEQ ID NO: 369 - RNA, 19 nt, synthetic construct
  source 1..19: mol_type = other RNA
agtcggaaaaggccatttg

SEQ ID NO: 370 - RNA, 19 nt, synthetic construct
  source 1..19: mol_type = other RNA
gtcggaaaaggccatttgt

SEQ ID NO: 371 - RNA, 19 nt, synthetic construct
  source 1..19: mol_type = other RNA
tcggaaaaggccatttgtt

SEQ ID NO: 372 - RNA, 19 nt, synthetic construct
  source 1..19: mol_type = other RNA
cggaaaaggccatttgttg

SEQ ID NO: 373 - RNA, 19 nt, synthetic construct
  source 1..19: mol_type = other RNA
ggaaaaggccatttgttgg

SEQ ID NO: 374 - RNA, 19 nt, synthetic construct
  source 1..19: mol_type = other RNA
gaaaaggccatttgttgga

SEQ ID NO: 375 - RNA, 19 nt, synthetic construct
  source 1..19: mol_type = other RNA
aaaaggccatttgttggaa

SEQ ID NO: 376 - RNA, 19 nt, synthetic construct
  source 1..19: mol_type = other RNA
aaaggccatttgttggaag

SEQ ID NO: 377 - RNA, 19 nt, synthetic construct
  source 1..19: mol_type = other RNA
aaggccatttgttggaaga

SEQ ID NO: 378 - RNA, 19 nt, synthetic construct
  source 1..19: mol_type = other RNA
aggccatttgttggaagat

SEQ ID NO: 379 - RNA, 19 nt, synthetic construct
  source 1..19: mol_type = other RNA
ggccatttgttggaagatg

SEQ ID NO: 380 - RNA, 19 nt, synthetic construct
  source 1..19: mol_type = other RNA
gccatttgttggaagatgt

SEQ ID NO: 381 - RNA, 19 nt, synthetic construct
  source 1..19: mol_type = other RNA
ccatttgttggaagatgtt

SEQ ID NO: 382 - RNA, 19 nt, synthetic construct
  source 1..19: mol_type = other RNA
catttgttggaagatgttg

SEQ ID NO: 383 - RNA, 19 nt, synthetic construct
  source 1..19: mol_type = other RNA
atttgttggaagatgttgt

SEQ ID NO: 384 - RNA, 19 nt, synthetic construct
  source 1..19: mol_type = other RNA
tttgttggaagatgttgtt

SEQ ID NO: 385 - RNA, 19 nt, synthetic construct
  source 1..19: mol_type = other RNA
ttgttggaagatgttgtta

SEQ ID NO: 386 - RNA, 19 nt, synthetic construct
  source 1..19: mol_type = other RNA
tgttggaagatgttgttac

SEQ ID NO: 387 - RNA, 19 nt, synthetic construct
  source 1..19: mol_type = other RNA
gttggaagatgttgttact

SEQ ID NO: 388 - RNA, 19 nt, synthetic construct
  source 1..19: mol_type = other RNA
ttggaagatgttgttactc

SEQ ID NO: 389 - RNA, 19 nt, synthetic construct
  source 1..19: mol_type = other RNA
tggaagatgttgttactcc

SEQ ID NO: 390 - RNA, 19 nt, synthetic construct
  source 1..19: mol_type = other RNA
ggaagatgttgttactcct

SEQ ID NO: 391 - RNA, 19 nt, synthetic construct
  source 1..19: mol_type = other RNA
gaagatgttgttactcctg

SEQ ID NO: 392 - RNA, 19 nt, synthetic construct
  source 1..19: mol_type = other RNA
aagatgttgttactcctgc

SEQ ID NO: 393 - RNA, 19 nt, synthetic construct
  source 1..19: mol_type = other RNA
agatgttgttactcctgca

SEQ ID NO: 394 - RNA, 19 nt, synthetic construct
  source 1..19: mol_type = other RNA
gatgttgttactcctgcac

SEQ ID NO: 395 - RNA, 19 nt, synthetic construct
  source 1..19: mol_type = other RNA
atgttgttactcctgcact

SEQ ID NO: 396 - RNA, 19 nt, synthetic construct
  source 1..19: mol_type = other RNA
tgttgttactcctgcactc

SEQ ID NO: 397 - RNA, 19 nt, synthetic construct
  source 1..19: mol_type = other RNA
gttgttactcctgcactcc

SEQ ID NO: 398 - RNA, 19 nt, synthetic construct
  source 1..19: mol_type = other RNA
ttgttactcctgcactccc

SEQ ID NO: 399 - RNA, 19 nt, synthetic construct
  source 1..19: mol_type = other RNA
tgttactcctgcactcccc

SEQ ID NO: 400 - RNA, 19 nt, synthetic construct
  source 1..19: mol_type = other RNA
gttactcctgcactcccca

SEQ ID NO: 401 - RNA, 19 nt, synthetic construct
  source 1..19: mol_type = other RNA
ttactcctgcactccccag

SEQ ID NO: 402 - RNA, 19 nt, synthetic construct
  source 1..19: mol_type = other RNA
tactcctgcactccccaga

SEQ ID NO: 403 - RNA, 19 nt, synthetic construct
  source 1..19: mol_type = other RNA
actcctgcactccccagag

SEQ ID NO: 404 - RNA, 19 nt, synthetic construct
  source 1..19: mol_type = other RNA
ctcctgcactccccagagc

SEQ ID NO: 405 - RNA, 19 nt, synthetic construct
  source 1..19: mol_type = other RNA
tcctgcactccccagagct

SEQ ID NO: 406 - RNA, 19 nt, synthetic construct
  source 1..19: mol_type = other RNA
cctgcactccccagagctg

SEQ ID NO: 407 - RNA, 19 nt, synthetic construct
  source 1..19: mol_type = other RNA
ctgcactccccagagctgg

SEQ ID NO: 408 - RNA, 19 nt, synthetic construct
  source 1..19: mol_type = other RNA
tgcactccccagagctggg

SEQ ID NO: 409 - RNA, 19 nt, synthetic construct
  source 1..19: mol_type = other RNA
gcactccccagagctggga

SEQ ID NO: 410 - RNA, 19 nt, synthetic construct
  source 1..19: mol_type = other RNA
cactccccagagctgggac

SEQ ID NO: 411 - RNA, 19 nt, synthetic construct
  source 1..19: mol_type = other RNA
actccccagagctgggaca

SEQ ID NO: 412 - RNA, 19 nt, synthetic construct
  source 1..19: mol_type = other RNA
ctccccagagctgggacaa

SEQ ID NO: 413 - RNA, 19 nt, synthetic construct
  source 1..19: mol_type = other RNA
tccccagagctgggacaaa

SEQ ID NO: 414 - RNA, 19 nt, synthetic construct
  source 1..19: mol_type = other RNA
ccccagagctgggacaaat

SEQ ID NO: 415 - RNA, 19 nt, synthetic construct
  source 1..19: mol_type = other RNA
cccagagctgggacaaatt

SEQ ID NO: 416 - RNA, 19 nt, synthetic construct
  source 1..19: mol_type = other RNA
ccagagctgggacaaattt

SEQ ID NO: 417 - RNA, 19 nt, synthetic construct
  source 1..19: mol_type = other RNA
cagagctgggacaaatttt

SEQ ID NO: 418 - RNA, 19 nt, synthetic construct
  source 1..19: mol_type = other RNA
agagctgggacaaattttt

SEQ ID NO: 419 - RNA, 19 nt, synthetic construct
  source 1..19: mol_type = other RNA
gagctgggacaaatttttc

SEQ ID NO: 420 - RNA, 19 nt, synthetic construct
  source 1..19: mol_type = other RNA
agctgggacaaatttttca

SEQ ID NO: 421 - RNA, 19 nt, synthetic construct
  source 1..19: mol_type = other RNA
gctgggacaaatttttcaa

SEQ ID NO: 422 - RNA, 19 nt, synthetic construct
  source 1..19: mol_type = other RNA
ctgggacaaatttttcaac

SEQ ID NO: 423 - RNA, 19 nt, synthetic construct
  source 1..19: mol_type = other RNA
tgggacaaatttttcaacc

SEQ ID NO: 424 - RNA, 19 nt, synthetic construct
  source 1..19: mol_type = other RNA
gggacaaatttttcaaccc

SEQ ID NO: 425 - RNA, 19 nt, synthetic construct
  source 1..19: mol_type = other RNA
ggacaaatttttcaacccc

SEQ ID NO: 426 - RNA, 19 nt, synthetic construct
  source 1..19: mol_type = other RNA
gacaaatttttcaacccca

SEQ ID NO: 427 - RNA, 19 nt, synthetic construct
  source 1..19: mol_type = other RNA
acaaatttttcaaccccag

SEQ ID NO: 428 - RNA, 19 nt, synthetic construct
  source 1..19: mol_type = other RNA
caaatttttcaaccccagt

SEQ ID NO: 429 - RNA, 19 nt, synthetic construct
  source 1..19: mol_type = other RNA
aaatttttcaaccccagta

SEQ ID NO: 430 - RNA, 19 nt, synthetic construct
  source 1..19: mol_type = other RNA
aatttttcaaccccagtat

SEQ ID NO: 431 - RNA, 19 nt, synthetic construct
  source 1..19: mol_type = other RNA
atttttcaaccccagtatc

SEQ ID NO: 432 - RNA, 19 nt, synthetic construct
  source 1..19: mol_type = other RNA
tttttcaaccccagtatcc

SEQ ID NO: 433 - RNA, 19 nt, synthetic construct
  source 1..19: mol_type = other RNA
ttttcaaccccagtatccc

SEQ ID NO: 434 - RNA, 19 nt, synthetic construct
  source 1..19: mol_type = other RNA
tttcaaccccagtatcccg

SEQ ID NO: 435 - RNA, 19 nt, synthetic construct
  source 1..19: mol_type = other RNA
ttcaaccccagtatcccgt

SEQ ID NO: 436 - RNA, 19 nt, synthetic construct
  source 1..19: mol_type = other RNA
tcaaccccagtatcccgtc

SEQ ID NO: 437 - RNA, 19 nt, synthetic construct
  source 1..19: mol_type = other RNA
caaccccagtatcccgtct

SEQ ID NO: 438 - RNA, 19 nt, synthetic construct
  source 1..19: mol_type = other RNA
aaccccagtatcccgtctt

SEQ ID NO: 439 - RNA, 19 nt, synthetic construct
  source 1..19: mol_type = other RNA
accccagtatcccgtcttt

SEQ ID NO: 440 - RNA, 19 nt, synthetic construct
  source 1..19: mol_type = other RNA
ccccagtatcccgtctttg

SEQ ID NO: 441 - RNA, 19 nt, synthetic construct
  source 1..19: mol_type = other RNA
cccagtatcccgtctttgg

SEQ ID NO: 442 - RNA, 19 nt, synthetic construct
  source 1..19: mol_type = other RNA
ccagtatcccgtctttggg

SEQ ID NO: 443 - RNA, 19 nt, synthetic construct
  source 1..19: mol_type = other RNA
cagtatcccgtctttgggt

SEQ ID NO: 444 - RNA, 19 nt, synthetic construct
  source 1..19: mol_type = other RNA
agtatcccgtctttgggtt

SEQ ID NO: 445 - RNA, 19 nt, synthetic construct
  source 1..19: mol_type = other RNA
gtatcccgtctttgggttt

SEQ ID NO: 446 - RNA, 19 nt, synthetic construct
  source 1..19: mol_type = other RNA
tatcccgtctttgggtttg

SEQ ID NO: 447 - RNA, 19 nt, synthetic construct
  source 1..19: mol_type = other RNA
atcccgtctttgggtttgc

SEQ ID NO: 448 - RNA, 19 nt, synthetic construct
  source 1..19: mol_type = other RNA
tcccgtctttgggtttgcg

SEQ ID NO: 449 - RNA, 19 nt, synthetic construct
  source 1..19: mol_type = other RNA
cccgtctttgggtttgcgg

SEQ ID NO: 450 - RNA, 19 nt, synthetic construct
  source 1..19: mol_type = other RNA
ccgtctttgggtttgcgga

SEQ ID NO: 451 - RNA, 19 nt, synthetic construct
  source 1..19: mol_type = other RNA
cgtctttgggtttgcggaa

SEQ ID NO: 452 - RNA, 19 nt, synthetic construct
  source 1..19: mol_type = other RNA
gtctttgggtttgcggaat

SEQ ID NO: 453 - RNA, 19 nt, synthetic construct
  source 1..19: mol_type = other RNA
tctttgggtttgcggaatg

SEQ ID NO: 454 - RNA, 19 nt, synthetic construct
  source 1..19: mol_type = other RNA
ctttgggtttgcggaatgt

SEQ ID NO: 455 - RNA, 19 nt, synthetic construct
  source 1..19: mol_type = other RNA
tttgggtttgcggaatgtt

SEQ ID NO: 456 - RNA, 19 nt, synthetic construct
  source 1..19: mol_type = other RNA
ttgggtttgcggaatgtta

SEQ ID NO: 457 - RNA, 19 nt, synthetic construct
  source 1..19: mol_type = other RNA
tgggtttgcggaatgttat

SEQ ID NO: 458 - RNA, 19 nt, synthetic construct
  source 1..19: mol_type = other RNA
gggtttgcggaatgttatt

SEQ ID NO: 459 - RNA, 19 nt, synthetic construct
  source 1..19: mol_type = other RNA
ggtttgcggaatgttattt

SEQ ID NO: 460 - RNA, 19 nt, synthetic construct
  source 1..19: mol_type = other RNA
gtttgcggaatgttattta

SEQ ID NO: 461 - RNA, 19 nt, synthetic construct
  source 1..19: mol_type = other RNA
tttgcggaatgttatttat

SEQ ID NO: 462 - RNA, 19 nt, synthetic construct
  source 1..19: mol_type = other RNA
ttgcggaatgttatttata

SEQ ID NO: 463 - RNA, 19 nt, synthetic construct
  source 1..19: mol_type = other RNA
tgcggaatgttatttatat

SEQ ID NO: 464 - RNA, 19 nt, synthetic construct
  source 1..19: mol_type = other RNA
gcggaatgttatttatatc

SEQ ID NO: 465 - RNA, 19 nt, synthetic construct
  source 1..19: mol_type = other RNA
cggaatgttatttatatca

SEQ ID NO: 466 - RNA, 19 nt, synthetic construct
  source 1..19: mol_type = other RNA
ggaatgttatttatatcaa

SEQ ID NO: 467 - RNA, 19 nt, synthetic construct
  source 1..19: mol_type = other RNA
gaatgttatttatatcaat

SEQ ID NO: 468 - RNA, 19 nt, synthetic construct
  source 1..19: mol_type = other RNA
aatgttatttatatcaatg

SEQ ID NO: 469 - RNA, 19 nt, synthetic construct
  source 1..19: mol_type = other RNA
atgttatttatatcaatga

SEQ ID NO: 470 - RNA, 19 nt, synthetic construct
  source 1..19: mol_type = other RNA
tgttatttatatcaatgaa

SEQ ID NO: 471 - RNA, 19 nt, synthetic construct
  source 1..19: mol_type = other RNA
gttatttatatcaatgaaa

SEQ ID NO: 472 - RNA, 19 nt, synthetic construct
  source 1..19: mol_type = other RNA
ttatttatatcaatgaaac

SEQ ID NO: 473 - RNA, 19 nt, synthetic construct
  source 1..19: mol_type = other RNA
tatttatatcaatgaaact

SEQ ID NO: 474 - RNA, 19 nt, synthetic construct
  source 1..19: mol_type = other RNA
atttatatcaatgaaactc

SEQ ID NO: 475 - RNA, 19 nt, synthetic construct
  source 1..19: mol_type = other RNA
tttatatcaatgaaactca

SEQ ID NO: 476 - RNA, 19 nt, synthetic construct
  source 1..19: mol_type = other RNA
ttatatcaatgaaactcac

SEQ ID NO: 477 - RNA, 19 nt, synthetic construct
  source 1..19: mol_type = other RNA
tatatcaatgaaactcaca

SEQ ID NO: 478 - RNA, 19 nt, synthetic construct
  source 1..19: mol_type = other RNA
atatcaatgaaactcacac

SEQ ID NO: 479 - RNA, 19 nt, synthetic construct
  source 1..19: mol_type = other RNA
tatcaatgaaactcacaca

SEQ ID NO: 480 - RNA, 19 nt, synthetic construct
  source 1..19: mol_type = other RNA
atcaatgaaactcacacaa

SEQ ID NO: 481 - RNA, 19 nt, synthetic construct
  source 1..19: mol_type = other RNA
tcaatgaaactcacacaag

SEQ ID NO: 482 - RNA, 19 nt, synthetic construct
  source 1..19: mol_type = other RNA
caatgaaactcacacaaga

SEQ ID NO: 483 - RNA, 19 nt, synthetic construct
  source 1..19: mol_type = other RNA
aatgaaactcacacaagac

SEQ ID NO: 484 - RNA, 19 nt, synthetic construct
  source 1..19: mol_type = other RNA
atgaaactcacacaagaca

SEQ ID NO: 485 - RNA, 19 nt, synthetic construct
  source 1..19: mol_type = other RNA
tgaaactcacacaagacac

SEQ ID NO: 486 - RNA, 19 nt, synthetic construct
  source 1..19: mol_type = other RNA
gaaactcacacaagacacc

SEQ ID NO: 487 - RNA, 19 nt, synthetic construct
  source 1..19: mol_type = other RNA
aaactcacacaagacaccg

SEQ ID NO: 488 - RNA, 19 nt, synthetic construct
  source 1..19: mol_type = other RNA
aactcacacaagacaccgc

SEQ ID NO: 489 - RNA, 19 nt, synthetic construct
  source 1..19: mol_type = other RNA
actcacacaagacaccgcg

SEQ ID NO: 490 - RNA, 19 nt, synthetic construct
  source 1..19: mol_type = other RNA
ctcacacaagacaccgcgg

SEQ ID NO: 491 - RNA, 19 nt, synthetic construct
  source 1..19: mol_type = other RNA
tcacacaagacaccgcgga

SEQ ID NO: 492 - RNA, 19 nt, synthetic construct
  source 1..19: mol_type = other RNA
cacacaagacaccgcggat

SEQ ID NO: 493 - RNA, 19 nt, synthetic construct
  source 1..19: mol_type = other RNA
acacaagacaccgcggatg

SEQ ID NO: 494 - RNA, 19 nt, synthetic construct
  source 1..19: mol_type = other RNA
cacaagacaccgcggatgg

SEQ ID NO: 495 - RNA, 19 nt, synthetic construct
  source 1..19: mol_type = other RNA
acaagacaccgcggatggc

SEQ ID NO: 496 - RNA, 19 nt, synthetic construct
  source 1..19: mol_type = other RNA
caagacaccgcggatggct

SEQ ID NO: 497 - RNA, 19 nt, synthetic construct
  source 1..19: mol_type = other RNA
aagacaccgcggatggctt

SEQ ID NO: 498 - RNA, 19 nt, synthetic construct
  source 1..19: mol_type = other RNA
agacaccgcggatggcttg

SEQ ID NO: 499 - RNA, 19 nt, synthetic construct
  source 1..19: mol_type = other RNA
gacaccgcggatggcttgc

SEQ ID NO: 500 - RNA, 19 nt, synthetic construct
  source 1..19: mol_type = other RNA
acaccgcggatggcttgca

SEQ ID NO: 501 - RNA, 19 nt, synthetic construct
  source 1..19: mol_type = other RNA
caccgcggatggcttgcaa

SEQ ID NO: 502 - RNA, 19 nt, synthetic construct
  source 1..19: mol_type = other RNA
accgcggatggcttgcaag

SEQ ID NO: 503 - RNA, 19 nt, synthetic construct
  source 1..19: mol_type = other RNA
ccgcggatggcttgcaaga

SEQ ID NO: 504 - RNA, 19 nt, synthetic construct
  source 1..19: mol_type = other RNA
cgcggatggcttgcaagac

SEQ ID NO: 505 - RNA, 19 nt, synthetic construct
  source 1..19: mol_type = other RNA
gcggatggcttgcaagacg

SEQ ID NO: 506 - RNA, 19 nt, synthetic construct
  source 1..19: mol_type = other RNA
cggatggcttgcaagacgc

SEQ ID NO: 507 - RNA, 19 nt, synthetic construct
  source 1..19: mol_type = other RNA
ggatggcttgcaagacgcc

SEQ ID NO: 508 - RNA, 19 nt, synthetic construct
  source 1..19: mol_type = other RNA
gatggcttgcaagacgcct

SEQ ID NO: 509 - RNA, 19 nt, synthetic construct
  source 1..19: mol_type = other RNA
atggcttgcaagacgcctt

SEQ ID NO: 510 - RNA, 19 nt, synthetic construct
  source 1..19: mol_type = other RNA
tggcttgcaagacgccttt

SEQ ID NO: 511 - RNA, 19 nt, synthetic construct
  source 1..19: mol_type = other RNA
ggcttgcaagacgcctttc

SEQ ID NO: 512 - RNA, 19 nt, synthetic construct
  source 1..19: mol_type = other RNA
gcttgcaagacgcctttct

SEQ ID NO: 513 - RNA, 19 nt, synthetic construct
  source 1..19: mol_type = other RNA
cttgcaagacgcctttctt

SEQ ID NO: 514 - RNA, 19 nt, synthetic construct
  source 1..19: mol_type = other RNA
ttgcaagacgcctttctta

SEQ ID NO: 515 - RNA, 19 nt, synthetic construct
  source 1..19: mol_type = other RNA
tgcaagacgcctttcttac

SEQ ID NO: 516 - RNA, 19 nt, synthetic construct
  source 1..19: mol_type = other RNA
gcaagacgcctttcttacg

SEQ ID NO: 517 - RNA, 19 nt, synthetic construct
  source 1..19: mol_type = other RNA
caagacgcctttcttacgt

SEQ ID NO: 518 - RNA, 19 nt, synthetic construct
  source 1..19: mol_type = other RNA
aagacgcctttcttacgtt

SEQ ID NO: 519 - RNA, 19 nt, synthetic construct
  source 1..19: mol_type = other RNA
agacgcctttcttacgttc

SEQ ID NO: 520 - RNA, 19 nt, synthetic construct
  source 1..19: mol_type = other RNA
gacgcctttcttacgttct

SEQ ID NO: 521 - RNA, 19 nt, synthetic construct
  source 1..19: mol_type = other RNA
acgcctttcttacgttctt

SEQ ID NO: 522 - RNA, 19 nt, synthetic construct
  source 1..19: mol_type = other RNA
cgcctttcttacgttcttt

SEQ ID NO: 523 - RNA, 19 nt, synthetic construct
  source 1..19: mol_type = other RNA
gcctttcttacgttctttt

SEQ ID NO: 524 - RNA, 19 nt, synthetic construct
  source 1..19: mol_type = other RNA
cctttcttacgttcttttt

SEQ ID NO: 525 - RNA, 19 nt, synthetic construct
  source 1..19: mol_type = other RNA
ctttcttacgttcttttta

SEQ ID NO: 526 - RNA, 19 nt, synthetic construct
  source 1..19: mol_type = other RNA
tttcttacgttctttttat

SEQ ID NO: 527 - RNA, 19 nt, synthetic construct
  source 1..19: mol_type = other RNA
ttcttacgttctttttatt

SEQ ID NO: 528 - RNA, 19 nt, synthetic construct
  source 1..19: mol_type = other RNA
tcttacgttctttttattc

SEQ ID NO: 529 - RNA, 19 nt, synthetic construct
  source 1..19: mol_type = other RNA
cttacgttctttttattca

SEQ ID NO: 530 - RNA, 19 nt, synthetic construct
  source 1..19: mol_type = other RNA
ttacgttctttttattcaa

SEQ ID NO: 531 - RNA, 19 nt, synthetic construct
  source 1..19: mol_type = other RNA
tacgttctttttattcaag

SEQ ID NO: 532 - RNA, 19 nt, synthetic construct
  source 1..19: mol_type = other RNA
acgttctttttattcaaga

SEQ ID NO: 533 - RNA, 19 nt, synthetic construct
  source 1..19: mol_type = other RNA
cgttctttttattcaagag

SEQ ID NO: 534 - RNA, 19 nt, synthetic construct
  source 1..19: mol_type = other RNA
gttctttttattcaagagc

SEQ ID NO: 535 - RNA, 19 nt, synthetic construct
  source 1..19: mol_type = other RNA
ttctttttattcaagagcg

SEQ ID NO: 536 - RNA, 19 nt, synthetic construct
  source 1..19: mol_type = other RNA
tctttttattcaagagcga

SEQ ID NO: 537 - RNA, 19 nt, synthetic construct
  source 1..19: mol_type = other RNA
ctttttattcaagagcgag

SEQ ID NO: 538 - RNA, 19 nt, synthetic construct
  source 1..19: mol_type = other RNA
tttttattcaagagcgaga

SEQ ID NO: 539 - RNA, 19 nt, synthetic construct
  source 1..19: mol_type = other RNA
ttttattcaagagcgagat

SEQ ID NO: 540 - RNA, 19 nt, synthetic construct
  source 1..19: mol_type = other RNA
tttattcaagagcgagatg

SEQ ID NO: 541 - RNA, 19 nt, synthetic construct
  source 1..19: mol_type = other RNA
ttattcaagagcgagatgt

SEQ ID NO: 542 - RNA, 19 nt, synthetic construct
  source 1..19: mol_type = other RNA
tattcaagagcgagatgtg

SEQ ID NO: 543 - RNA, 19 nt, synthetic construct
  source 1..19: mol_type = other RNA
attcaagagcgagatgtgc

SEQ ID NO: 544 - RNA, 19 nt, synthetic construct
  source 1..19: mol_type = other RNA
ttcaagagcgagatgtgca

SEQ ID NO: 545 - RNA, 19 nt, synthetic construct
  source 1..19: mol_type = other RNA
tcaagagcgagatgtgcat

SEQ ID NO: 546 - RNA, 19 nt, synthetic construct
  source 1..19: mol_type = other RNA
caagagcgagatgtgcata

SEQ ID NO: 547 - RNA, 19 nt, synthetic construct
  source 1..19: mol_type = other RNA
aagagcgagatgtgcataa

SEQ ID NO: 548 - RNA, 19 nt, synthetic construct
  source 1..19: mol_type = other RNA
agagcgagatgtgcataag

SEQ ID NO: 549 - RNA, 19 nt, synthetic construct
  source 1..19: mol_type = other RNA
gagcgagatgtgcataagg

SEQ ID NO: 550 - RNA, 19 nt, synthetic construct
  source 1..19: mol_type = other RNA
agcgagatgtgcataaggg

SEQ ID NO: 551 - RNA, 19 nt, synthetic construct
  source 1..19: mol_type = other RNA
gcgagatgtgcataagggc

SEQ ID NO: 552 - RNA, 19 nt, synthetic construct
  source 1..19: mol_type = other RNA
cgagatgtgcataagggca

SEQ ID NO: 553 - RNA, 19 nt, synthetic construct
  source 1..19: mol_type = other RNA
gagatgtgcataagggcat

SEQ ID NO: 554 - RNA, 19 nt, synthetic construct
  source 1..19: mol_type = other RNA
agatgtgcataagggcatg

SEQ ID NO: 555 - RNA, 19 nt, synthetic construct
  source 1..19: mol_type = other RNA
gatgtgcataagggcatgt

SEQ ID NO: 556 - RNA, 19 nt, synthetic construct
  source 1..19: mol_type = other RNA
atgtgcataagggcatgtt

SEQ ID NO: 557 - RNA, 19 nt, synthetic construct
  source 1..19: mol_type = other RNA
tgtgcataagggcatgttt

SEQ ID NO: 558 - RNA, 19 nt, synthetic construct
  source 1..19: mol_type = other RNA
gtgcataagggcatgtttg

SEQ ID NO: 559 - RNA, 19 nt, synthetic construct
  source 1..19: mol_type = other RNA
tgcataagggcatgtttgc

SEQ ID NO: 560 - RNA, 19 nt, synthetic construct
  source 1..19: mol_type = other RNA
gcataagggcatgtttgcc

SEQ ID NO: 561 - RNA, 19 nt, synthetic construct
  source 1..19: mol_type = other RNA
cataagggcatgtttgcca

SEQ ID NO: 562 - RNA, 19 nt, synthetic construct
  source 1..19: mol_type = other RNA
ataagggcatgtttgccac

SEQ ID NO: 563 - RNA, 19 nt, synthetic construct
  source 1..19: mol_type = other RNA
taagggcatgtttgccacc

SEQ ID NO: 564 - RNA, 19 nt, synthetic construct
  source 1..19: mol_type = other RNA
aagggcatgtttgccacca

SEQ ID NO: 565 - RNA, 19 nt, synthetic construct
  source 1..19: mol_type = other RNA
agggcatgtttgccaccaa

SEQ ID NO: 566 - RNA, 19 nt, synthetic construct
  source 1..19: mol_type = other RNA
gggcatgtttgccaccaat

SEQ ID NO: 567 - RNA, 19 nt, synthetic construct
  source 1..19: mol_type = other RNA
ggcatgtttgccaccaatg

SEQ ID NO: 568 - RNA, 19 nt, synthetic construct
  source 1..19: mol_type = other RNA
gcatgtttgccaccaatgt

SEQ ID NO: 569 - RNA, 19 nt, synthetic construct
  source 1..19: mol_type = other RNA
catgtttgccaccaatgtg

SEQ ID NO: 570 - RNA, 19 nt, synthetic construct
  source 1..19: mol_type = other RNA
atgtttgccaccaatgtga

SEQ ID NO: 571 - RNA, 19 nt, synthetic construct
  source 1..19: mol_type = other RNA
tgtttgccaccaatgtgac

SEQ ID NO: 572 - RNA, 19 nt, synthetic construct
  source 1..19: mol_type = other RNA
gtttgccaccaatgtgact

SEQ ID NO: 573 - RNA, 19 nt, synthetic construct
  source 1..19: mol_type = other RNA
tttgccaccaatgtgactg

SEQ ID NO: 574 - RNA, 19 nt, synthetic construct
  source 1..19: mol_type = other RNA
ttgccaccaatgtgactga

SEQ ID NO: 575 - RNA, 19 nt, synthetic construct
  source 1..19: mol_type = other RNA
tgccaccaatgtgactgaa

SEQ ID NO: 576 - RNA, 19 nt, synthetic construct
  source 1..19: mol_type = other RNA
gccaccaatgtgactgaaa

SEQ ID NO: 577 - RNA, 19 nt, synthetic construct
  source 1..19: mol_type = other RNA
ccaccaatgtgactgaaaa

SEQ ID NO: 578 - RNA, 19 nt, synthetic construct
  source 1..19: mol_type = other RNA
caccaatgtgactgaaaat

SEQ ID NO: 579 - RNA, 19 nt, synthetic construct
  source 1..19: mol_type = other RNA
accaatgtgactgaaaatg

SEQ ID NO: 580 - RNA, 19 nt, synthetic construct
  source 1..19: mol_type = other RNA
ccaatgtgactgaaaatgt

SEQ ID NO: 581 - RNA, 19 nt, synthetic construct
  source 1..19: mol_type = other RNA
caatgtgactgaaaatgtg

SEQ ID NO: 582 - RNA, 19 nt, synthetic construct
  source 1..19: mol_type = other RNA
aatgtgactgaaaatgtgc

SEQ ID NO: 583 - RNA, 19 nt, synthetic construct
  source 1..19: mol_type = other RNA
atgtgactgaaaatgtgct

SEQ ID NO: 584 - RNA, 19 nt, synthetic construct
  source 1..19: mol_type = other RNA
tgtgactgaaaatgtgctg

SEQ ID NO: 585 - RNA, 19 nt, synthetic construct
  source 1..19: mol_type = other RNA
gtgactgaaaatgtgctga

SEQ ID NO: 586 - RNA, 19 nt, synthetic construct
  source 1..19: mol_type = other RNA
tgactgaaaatgtgctgaa

SEQ ID NO: 587 - RNA, 19 nt, synthetic construct
  source 1..19: mol_type = other RNA
gactgaaaatgtgctgaac

SEQ ID NO: 588 - RNA, 19 nt, synthetic construct
  source 1..19: mol_type = other RNA
actgaaaatgtgctgaaca

SEQ ID NO: 589 - RNA, 19 nt, synthetic construct
  source 1..19: mol_type = other RNA
ctgaaaatgtgctgaacag

SEQ ID NO: 590 - RNA, 19 nt, synthetic construct
  source 1..19: mol_type = other RNA
tgaaaatgtgctgaacagc

SEQ ID NO: 591 - RNA, 19 nt, synthetic construct
  source 1..19: mol_type = other RNA
gaaaatgtgctgaacagca

SEQ ID NO: 592 - RNA, 19 nt, synthetic construct
  source 1..19: mol_type = other RNA
aaaatgtgctgaacagcag

SEQ ID NO: 593 - RNA, 19 nt, synthetic construct
  source 1..19: mol_type = other RNA
aaatgtgctgaacagcagt

SEQ ID NO: 594 - RNA, 19 nt, synthetic construct
  source 1..19: mol_type = other RNA
aatgtgctgaacagcagta

SEQ ID NO: 595 - RNA, 19 nt, synthetic construct
  source 1..19: mol_type = other RNA
atgtgctgaacagcagtag

SEQ ID NO: 596 - RNA, 19 nt, synthetic construct
  source 1..19: mol_type = other RNA
tgtgctgaacagcagtaga

SEQ ID NO: 597 - RNA, 19 nt, synthetic construct
  source 1..19: mol_type = other RNA
gtgctgaacagcagtagag

SEQ ID NO: 598 - RNA, 19 nt, synthetic construct
  source 1..19: mol_type = other RNA
tgctgaacagcagtagagt

SEQ ID NO: 599 - RNA, 19 nt, synthetic construct
  source 1..19: mol_type = other RNA
gctgaacagcagtagagta

SEQ ID NO: 600 - RNA, 19 nt, synthetic construct
  source 1..19: mol_type = other RNA
ctgaacagcagtagagtac

SEQ ID NO: 601 - RNA, 19 nt, synthetic construct
  source 1..19: mol_type = other RNA
tgaacagcagtagagtaca

SEQ ID NO: 602 - RNA, 19 nt, synthetic construct
  source 1..19: mol_type = other RNA
gaacagcagtagagtacaa

SEQ ID NO: 603 - RNA, 19 nt, synthetic construct
  source 1..19: mol_type = other RNA
aacagcagtagagtacaag

SEQ ID NO: 604 - RNA, 19 nt, synthetic construct
  source 1..19: mol_type = other RNA
acagcagtagagtacaaga

SEQ ID NO: 605 - RNA, 19 nt, synthetic construct
  source 1..19: mol_type = other RNA
cagcagtagagtacaagag

SEQ ID NO: 606 - RNA, 19 nt, synthetic construct
  source 1..19: mol_type = other RNA
agcagtagagtacaagagg

SEQ ID NO: 607 - RNA, 19 nt, synthetic construct
  source 1..19: mol_type = other RNA
gcagtagagtacaagaggc

SEQ ID NO: 608 - RNA, 19 nt, synthetic construct
  source 1..19: mol_type = other RNA
cagtagagtacaagaggca

SEQ ID NO: 609 - RNA, 19 nt, synthetic construct
  source 1..19: mol_type = other RNA
agtagagtacaagaggcaa

SEQ ID NO: 610 - RNA, 19 nt, synthetic construct
  source 1..19: mol_type = other RNA
gtagagtacaagaggcaat

SEQ ID NO: 611 - RNA, 19 nt, synthetic construct
  source 1..19: mol_type = other RNA
tagagtacaagaggcaatt

SEQ ID NO: 612 - RNA, 19 nt, synthetic construct
  source 1..19: mol_type = other RNA
agagtacaagaggcaattg

SEQ ID NO: 613 - RNA, 19 nt, synthetic construct
  source 1..19: mol_type = other RNA
gagtacaagaggcaattgc

SEQ ID NO: 614 - RNA, 19 nt, synthetic construct
  source 1..19: mol_type = other RNA
agtacaagaggcaattgca

SEQ ID NO: 615 - RNA, 19 nt, synthetic construct
  source 1..19: mol_type = other RNA
gtacaagaggcaattgcag

SEQ ID NO: 616 - RNA, 19 nt, synthetic construct
  source 1..19: mol_type = other RNA
tacaagaggcaattgcaga

SEQ ID NO: 617 - RNA, 19 nt, synthetic construct
  source 1..19: mol_type = other RNA
acaagaggcaattgcagaa

SEQ ID NO: 618 - RNA, 19 nt, synthetic construct
  source 1..19: mol_type = other RNA
caagaggcaattgcagaag

SEQ ID NO: 619 - RNA, 19 nt, synthetic construct
  source 1..19: mol_type = other RNA
aagaggcaattgcagaagt

SEQ ID NO: 620 - RNA, 19 nt, synthetic construct
  source 1..19: mol_type = other RNA
agaggcaattgcagaagtg

SEQ ID NO: 621 - RNA, 19 nt, synthetic construct
  source 1..19: mol_type = other RNA
gaggcaattgcagaagtgg

SEQ ID NO: 622 - RNA, 19 nt, synthetic construct
  source 1..19: mol_type = other RNA
aggcaattgcagaagtggc

SEQ ID NO: 623 - RNA, 19 nt, synthetic construct
  source 1..19: mol_type = other RNA
ggcaattgcagaagtggct

SEQ ID NO: 624 - RNA, 19 nt, synthetic construct
  source 1..19: mol_type = other RNA
gcaattgcagaagtggctg

SEQ ID NO: 625 - RNA, 19 nt, synthetic construct
  source 1..19: mol_type = other RNA
caattgcagaagtggctgc

SEQ ID NO: 626 - RNA, 19 nt, synthetic construct
  source 1..19: mol_type = other RNA
aattgcagaagtggctgct

SEQ ID NO: 627 - RNA, 19 nt, synthetic construct
  source 1..19: mol_type = other RNA
attgcagaagtggctgctg

SEQ ID NO: 628 - RNA, 19 nt, synthetic construct
  source 1..19: mol_type = other RNA
ttgcagaagtggctgctga

SEQ ID NO: 629 - RNA, 19 nt, synthetic construct
  source 1..19: mol_type = other RNA
tgcagaagtggctgctgaa

SEQ ID NO: 630 - RNA, 19 nt, synthetic construct
  source 1..19: mol_type = other RNA
gcagaagtggctgctgaat

SEQ ID NO: 631 - RNA, 19 nt, synthetic construct
  source 1..19: mol_type = other RNA
cagaagtggctgctgaatt

SEQ ID NO: 632 - RNA, 19 nt, synthetic construct
  source 1..19: mol_type = other RNA
agaagtggctgctgaatta

SEQ ID NO: 633 - RNA, 19 nt, synthetic construct
  source 1..19: mol_type = other RNA
gaagtggctgctgaattaa

SEQ ID NO: 634 - RNA, 19 nt, synthetic construct
  source 1..19: mol_type = other RNA
aagtggctgctgaattaaa

SEQ ID NO: 635 - RNA, 19 nt, synthetic construct
  source 1..19: mol_type = other RNA
agtggctgctgaattaaac

SEQ ID NO: 636 - RNA, 19 nt, synthetic construct
  source 1..19: mol_type = other RNA
gtggctgctgaattaaacc

SEQ ID NO: 637 - RNA, 19 nt, synthetic construct
  source 1..19: mol_type = other RNA
tggctgctgaattaaaccc

SEQ ID NO: 638 - RNA, 19 nt, synthetic construct
  source 1..19: mol_type = other RNA
ggctgctgaattaaaccct

SEQ ID NO: 639 - RNA, 19 nt, synthetic construct
  source 1..19: mol_type = other RNA
gctgctgaattaaaccctg

SEQ ID NO: 640 - RNA, 19 nt, synthetic construct
  source 1..19: mol_type = other RNA
ctgctgaattaaaccctga

SEQ ID NO: 641 - RNA, 19 nt, synthetic construct
  source 1..19: mol_type = other RNA
tgctgaattaaaccctgat

SEQ ID NO: 642 - RNA, 19 nt, synthetic construct
  source 1..19: mol_type = other RNA
gctgaattaaaccctgatg

SEQ ID NO: 643 - RNA, 19 nt, synthetic construct
  source 1..19: mol_type = other RNA
ctgaattaaaccctgatgg

SEQ ID NO: 644 - RNA, 19 nt, synthetic construct
  source 1..19: mol_type = other RNA
tgaattaaaccctgatggt

SEQ ID NO: 645 - RNA, 19 nt, synthetic construct
  source 1..19: mol_type = other RNA
gaattaaaccctgatggtt

SEQ ID NO: 646 - RNA, 19 nt, synthetic construct
  source 1..19: mol_type = other RNA
aattaaaccctgatggttc

SEQ ID NO: 647 - RNA, 19 nt, synthetic construct
  source 1..19: mol_type = other RNA
attaaaccctgatggttct

SEQ ID NO: 648 - RNA, 19 nt, synthetic construct
  source 1..19: mol_type = other RNA
ttaaaccctgatggttctg

SEQ ID NO: 649 - RNA, 19 nt, synthetic construct
  source 1..19: mol_type = other RNA
taaaccctgatggttctgc

SEQ ID NO: 650 - RNA, 19 nt, synthetic construct
  source 1..19: mol_type = other RNA
aaaccctgatggttctgcc

SEQ ID NO: 651 - RNA, 19 nt, synthetic construct
  source 1..19: mol_type = other RNA
aaccctgatggttctgccc

SEQ ID NO: 652 - RNA, 19 nt, synthetic construct
  source 1..19: mol_type = other RNA
accctgatggttctgccca

SEQ ID NO: 653 - RNA, 19 nt, synthetic construct
  source 1..19: mol_type = other RNA
ccctgatggttctgcccag

SEQ ID NO: 654 - RNA, 19 nt, synthetic construct
  source 1..19: mol_type = other RNA
cctgatggttctgcccagc

SEQ ID NO: 655 - RNA, 19 nt, synthetic construct
  source 1..19: mol_type = other RNA
ctgatggttctgcccagca

SEQ ID NO: 656 - RNA, 19 nt, synthetic construct
  source 1..19: mol_type = other RNA
tgatggttctgcccagcag

SEQ ID NO: 657 - RNA, 19 nt, synthetic construct
  source 1..19: mol_type = other RNA
gatggttctgcccagcagc

SEQ ID NO: 658 - RNA, 19 nt, synthetic construct
  source 1..19: mol_type = other RNA
atggttctgcccagcagca

SEQ ID NO: 659 - RNA, 19 nt, synthetic construct
  source 1..19: mol_type = other RNA
tggttctgcccagcagcaa

SEQ ID NO: 660 - RNA, 19 nt, synthetic construct
  source 1..19: mol_type = other RNA
ggttctgcccagcagcaat

SEQ ID NO: 661 - RNA, 19 nt, synthetic construct
  source 1..19: mol_type = other RNA
gttctgcccagcagcaatc

SEQ ID NO: 662 - RNA, 19 nt, synthetic construct
  source 1..19: mol_type = other RNA
ttctgcccagcagcaatca

SEQ ID NO: 663 - RNA, 19 nt, synthetic construct
  source 1..19: mol_type = other RNA
tctgcccagcagcaatcaa

SEQ ID NO: 664 - RNA, 19 nt, synthetic construct
  source 1..19: mol_type = other RNA
ctgcccagcagcaatcaaa

SEQ ID NO: 665 - RNA, 19 nt, synthetic construct
  source 1..19: mol_type = other RNA
tgcccagcagcaatcaaaa

SEQ ID NO: 666 - RNA, 19 nt, synthetic construct
  source 1..19: mol_type = other RNA
gcccagcagcaatcaaaag

SEQ ID NO: 667 - RNA, 19 nt, synthetic construct
  source 1..19: mol_type = other RNA
cccagcagcaatcaaaagc

SEQ ID NO: 668 - RNA, 19 nt, synthetic construct
  source 1..19: mol_type = other RNA
ccagcagcaatcaaaagcc

SEQ ID NO: 669 - RNA, 19 nt, synthetic construct
  source 1..19: mol_type = other RNA
cagcagcaatcaaaagccg

SEQ ID NO: 670 - RNA, 19 nt, synthetic construct
  source 1..19: mol_type = other RNA
agcagcaatcaaaagccgt

SEQ ID NO: 671 - RNA, 19 nt, synthetic construct
  source 1..19: mol_type = other RNA
gcagcaatcaaaagccgtt

SEQ ID NO: 672 - RNA, 19 nt, synthetic construct
  source 1..19: mol_type = other RNA
cagcaatcaaaagccgtta

SEQ ID NO: 673 - RNA, 19 nt, synthetic construct
  source 1..19: mol_type = other RNA
agcaatcaaaagccgttaa

SEQ ID NO: 674 - RNA, 19 nt, synthetic construct
  source 1..19: mol_type = other RNA
gcaatcaaaagccgttaac

SEQ ID NO: 675 - RNA, 19 nt, synthetic construct
  source 1..19: mol_type = other RNA
caatcaaaagccgttaaca

SEQ ID NO: 676 - RNA, 19 nt, synthetic construct
  source 1..19: mol_type = other RNA
aatcaaaagccgttaacaa

SEQ ID NO: 677 - RNA, 19 nt, synthetic construct
  source 1..19: mol_type = other RNA
atcaaaagccgttaacaaa

SEQ ID NO: 678 - RNA, 19 nt, synthetic construct
  source 1..19: mol_type = other RNA
tcaaaagccgttaacaaag

SEQ ID NO: 679 - RNA, 19 nt, synthetic construct
  source 1..19: mol_type = other RNA
caaaagccgttaacaaagt

SEQ ID NO: 680 - RNA, 19 nt, synthetic construct
  source 1..19: mol_type = other RNA
aaaagccgttaacaaagtg

SEQ ID NO: 681 - RNA, 19 nt, synthetic construct
  source 1..19: mol_type = other RNA
aaagccgttaacaaagtga

SEQ ID NO: 682 - RNA, 19 nt, synthetic construct
  source 1..19: mol_type = other RNA
aagccgttaacaaagtgaa

SEQ ID NO: 683 - RNA, 19 nt, synthetic construct
  source 1..19: mol_type = other RNA
agccgttaacaaagtgaaa

SEQ ID NO: 684 - RNA, 19 nt, synthetic construct
  source 1..19: mol_type = other RNA
gccgttaacaaagtgaaaa

SEQ ID NO: 685 - RNA, 19 nt, synthetic construct
  source 1..19: mol_type = other RNA
ccgttaacaaagtgaaaaa

SEQ ID NO: 686 - RNA, 19 nt, synthetic construct
  source 1..19: mol_type = other RNA
cgttaacaaagtgaaaaag

SEQ ID NO: 687 - RNA, 19 nt, synthetic construct
  source 1..19: mol_type = other RNA
gttaacaaagtgaaaaaga

SEQ ID NO: 688 - RNA, 19 nt, synthetic construct
  source 1..19: mol_type = other RNA
ttaacaaagtgaaaaagaa

SEQ ID NO: 689 - RNA, 19 nt, synthetic construct
  source 1..19: mol_type = other RNA
taacaaagtgaaaaagaaa

SEQ ID NO: 690 - RNA, 19 nt, synthetic construct
  source 1..19: mol_type = other RNA
aacaaagtgaaaaagaaag

SEQ ID NO: 691 - RNA, 19 nt, synthetic construct
  source 1..19: mol_type = other RNA
acaaagtgaaaaagaaagc

SEQ ID NO: 692 - RNA, 19 nt, synthetic construct
  source 1..19: mol_type = other RNA
caaagtgaaaaagaaagct

SEQ ID NO: 693 - RNA, 19 nt, synthetic construct
  source 1..19: mol_type = other RNA
aaagtgaaaaagaaagcta

SEQ ID NO: 694 - RNA, 19 nt, synthetic construct
  source 1..19: mol_type = other RNA
aagtgaaaaagaaagctaa

SEQ ID NO: 695 - RNA, 19 nt, synthetic construct
  source 1..19: mol_type = other RNA
agtgaaaaagaaagctaaa

SEQ ID NO: 696 - RNA, 19 nt, synthetic construct
  source 1..19: mol_type = other RNA
gtgaaaaagaaagctaaaa

SEQ ID NO: 697 - RNA, 19 nt, synthetic construct
  source 1..19: mol_type = other RNA
tgaaaaagaaagctaaaag

SEQ ID NO: 698 - RNA, 19 nt, synthetic construct
  source 1..19: mol_type = other RNA
gaaaaagaaagctaaaagg

SEQ ID NO: 699 - RNA, 19 nt, synthetic construct
  source 1..19: mol_type = other RNA
aaaaagaaagctaaaagga

SEQ ID NO: 700 - RNA, 19 nt, synthetic construct
  source 1..19: mol_type = other RNA
aaaagaaagctaaaaggat

SEQ ID NO: 701 - RNA, 19 nt, synthetic construct
  source 1..19: mol_type = other RNA
aaagaaagctaaaaggatt

SEQ ID NO: 702 - RNA, 19 nt, synthetic construct
  source 1..19: mol_type = other RNA
aagaaagctaaaaggattc

SEQ ID NO: 703 - RNA, 19 nt, synthetic construct
  source 1..19: mol_type = other RNA
agaaagctaaaaggattct

SEQ ID NO: 704 - RNA, 19 nt, synthetic construct
  source 1..19: mol_type = other RNA
gaaagctaaaaggattctt

SEQ ID NO: 705 - RNA, 19 nt, synthetic construct
  source 1..19: mol_type = other RNA
aaagctaaaaggattcttc

SEQ ID NO: 706 - RNA, 19 nt, synthetic construct
  source 1..19: mol_type = other RNA
aagctaaaaggattcttca

SEQ ID NO: 707 - RNA, 19 nt, synthetic construct
  source 1..19: mol_type = other RNA
agctaaaaggattcttcaa

SEQ ID NO: 708 - RNA, 19 nt, synthetic construct
  source 1..19: mol_type = other RNA
gctaaaaggattcttcaag

SEQ ID NO: 709 - RNA, 19 nt, synthetic construct
  source 1..19: mol_type = other RNA
ctaaaaggattcttcaaga

SEQ ID NO: 710 - RNA, 19 nt, synthetic construct
  source 1..19: mol_type = other RNA
taaaaggattcttcaagaa

SEQ ID NO: 711 - RNA, 19 nt, synthetic construct
  source 1..19: mol_type = other RNA
aaaaggattcttcaagaaa

SEQ ID NO: 712 - RNA, 19 nt, synthetic construct
  source 1..19: mol_type = other RNA
aaaggattcttcaagaaat

SEQ ID NO: 713 - RNA, 19 nt, synthetic construct
  source 1..19: mol_type = other RNA
aaggattcttcaagaaatg

SEQ ID NO: 714 - RNA, 19 nt, synthetic construct
  source 1..19: mol_type = other RNA
aggattcttcaagaaatgg

SEQ ID NO: 715 - RNA, 19 nt, synthetic construct
  source 1..19: mol_type = other RNA
ggattcttcaagaaatggt

SEQ ID NO: 716 - RNA, 19 nt, synthetic construct
  source 1..19: mol_type = other RNA
gattcttcaagaaatggtt

SEQ ID NO: 717 - RNA, 19 nt, synthetic construct
  source 1..19: mol_type = other RNA
attcttcaagaaatggttg

SEQ ID NO: 718 - RNA, 19 nt, synthetic construct
  source 1..19: mol_type = other RNA
ttcttcaagaaatggttgc

SEQ ID NO: 719 - RNA, 19 nt, synthetic construct
  source 1..19: mol_type = other RNA
tcttcaagaaatggttgcc

SEQ ID NO: 720 - RNA, 19 nt, synthetic construct
  source 1..19: mol_type = other RNA
cttcaagaaatggttgcca

SEQ ID NO: 721 - RNA, 19 nt, synthetic construct
  source 1..19: mol_type = other RNA
ttcaagaaatggttgccac

SEQ ID NO: 722 - RNA, 19 nt, synthetic construct
  source 1..19: mol_type = other RNA
tcaagaaatggttgccact

SEQ ID NO: 723 - RNA, 19 nt, synthetic construct
  source 1..19: mol_type = other RNA
caagaaatggttgccactg

SEQ ID NO: 724 - RNA, 19 nt, synthetic construct
  source 1..19: mol_type = other RNA
aagaaatggttgccactgt

SEQ ID NO: 725 - RNA, 19 nt, synthetic construct
  source 1..19: mol_type = other RNA
agaaatggttgccactgtc

SEQ ID NO: 726 - RNA, 19 nt, synthetic construct
  source 1..19: mol_type = other RNA
gaaatggttgccactgtct

SEQ ID NO: 727 - RNA, 19 nt, synthetic construct
  source 1..19: mol_type = other RNA
aaatggttgccactgtctc

SEQ ID NO: 728 - RNA, 19 nt, synthetic construct
  source 1..19: mol_type = other RNA
aatggttgccactgtctca

SEQ ID NO: 729 - RNA, 19 nt, synthetic construct
  source 1..19: mol_type = other RNA
atggttgccactgtctcac

SEQ ID NO: 730 - RNA, 19 nt, synthetic construct
  source 1..19: mol_type = other RNA
tggttgccactgtctcacc

SEQ ID NO: 731 - RNA, 19 nt, synthetic construct
  source 1..19: mol_type = other RNA
ggttgccactgtctcaccg

SEQ ID NO: 732 - RNA, 19 nt, synthetic construct
  source 1..19: mol_type = other RNA
gttgccactgtctcaccgg

SEQ ID NO: 733 - RNA, 19 nt, synthetic construct
  source 1..19: mol_type = other RNA
ttgccactgtctcaccggc

SEQ ID NO: 734 - RNA, 19 nt, synthetic construct
  source 1..19: mol_type = other RNA
tgccactgtctcaccggca

SEQ ID NO: 735 - RNA, 19 nt, synthetic construct
  source 1..19: mol_type = other RNA
gccactgtctcaccggcaa

SEQ ID NO: 736 - RNA, 19 nt, synthetic construct
  source 1..19: mol_type = other RNA
ccactgtctcaccggcaat

SEQ ID NO: 737 - RNA, 19 nt, synthetic construct
  source 1..19: mol_type = other RNA
cactgtctcaccggcaatg

SEQ ID NO: 738 - RNA, 19 nt, synthetic construct
  source 1..19: mol_type = other RNA
actgtctcaccggcaatga

SEQ ID NO: 739 - RNA, 19 nt, synthetic construct
  source 1..19: mol_type = other RNA
ctgtctcaccggcaatgat

SEQ ID NO: 740 - RNA, 19 nt, synthetic construct
  source 1..19: mol_type = other RNA
tgtctcaccggcaatgatc

SEQ ID NO: 741 - RNA, 19 nt, synthetic construct
  source 1..19: mol_type = other RNA
gtctcaccggcaatgatca

SEQ ID NO: 742 - RNA, 19 nt, synthetic construct
  source 1..19: mol_type = other RNA
tctcaccggcaatgatcag

SEQ ID NO: 743 - RNA, 19 nt, synthetic construct
  source 1..19: mol_type = other RNA
ctcaccggcaatgatcaga

SEQ ID NO: 744 - RNA, 19 nt, synthetic construct
  source 1..19: mol_type = other RNA
tcaccggcaatgatcagac

SEQ ID NO: 745 - RNA, 19 nt, synthetic construct
  source 1..19: mol_type = other RNA
caccggcaatgatcagact

SEQ ID NO: 746 - RNA, 19 nt, synthetic construct
  source 1..19: mol_type = other RNA
accggcaatgatcagactg

SEQ ID NO: 747 - RNA, 19 nt, synthetic construct
  source 1..19: mol_type = other RNA
ccggcaatgatcagactga

SEQ ID NO: 748 - RNA, 19 nt, synthetic construct
  source 1..19: mol_type = other RNA
cggcaatgatcagactgac

SEQ ID NO: 749 - RNA, 19 nt, synthetic construct
  source 1..19: mol_type = other RNA
ggcaatgatcagactgact

SEQ ID NO: 750 - RNA, 19 nt, synthetic construct
  source 1..19: mol_type = other RNA
gcaatgatcagactgactg

SEQ ID NO: 751 - RNA, 19 nt, synthetic construct
  source 1..19: mol_type = other RNA
caatgatcagactgactgg

SEQ ID NO: 752 - RNA, 19 nt, synthetic construct
  source 1..19: mol_type = other RNA
aatgatcagactgactggg

SEQ ID NO: 753 - RNA, 19 nt, synthetic construct
  source 1..19: mol_type = other RNA
atgatcagactgactgggt

SEQ ID NO: 754 - RNA, 19 nt, synthetic construct
  source 1..19: mol_type = other RNA
tgatcagactgactgggtg

SEQ ID NO: 755 - RNA, 19 nt, synthetic construct
  source 1..19: mol_type = other RNA
gatcagactgactgggtgg

SEQ ID NO: 756 - RNA, 19 nt, synthetic construct
  source 1..19: mol_type = other RNA
atcagactgactgggtggg

SEQ ID NO: 757 - RNA, 19 nt, synthetic construct
  source 1..19: mol_type = other RNA
tcagactgactgggtgggt

SEQ ID NO: 758 - RNA, 19 nt, synthetic construct
  source 1..19: mol_type = other RNA
cagactgactgggtgggtg

SEQ ID NO: 759 - RNA, 19 nt, synthetic construct
  source 1..19: mol_type = other RNA
agactgactgggtgggtgc

SEQ ID NO: 760 - RNA, 19 nt, synthetic construct
  source 1..19: mol_type = other RNA
gactgactgggtgggtgct

SEQ ID NO: 761 - RNA, 19 nt, synthetic construct
  source 1..19: mol_type = other RNA
actgactgggtgggtgctg

SEQ ID NO: 762 - RNA, 19 nt, synthetic construct
  source 1..19: mol_type = other RNA
ctgactgggtgggtgctgc

SEQ ID NO: 763 - RNA, 19 nt, synthetic construct
  source 1..19: mol_type = other RNA
tgactgggtgggtgctgct

SEQ ID NO: 764 - RNA, 19 nt, synthetic construct
  source 1..19: mol_type = other RNA
gactgggtgggtgctgcta

SEQ ID NO: 765 - RNA, 19 nt, synthetic construct
  source 1..19: mol_type = other RNA
actgggtgggtgctgctaa

SEQ ID NO: 766 - RNA, 19 nt, synthetic construct
  source 1..19: mol_type = other RNA
ctgggtgggtgctgctaaa

SEQ ID NO: 767 - RNA, 19 nt, synthetic construct
  source 1..19: mol_type = other RNA
tgggtgggtgctgctaaaa

SEQ ID NO: 768 - RNA, 19 nt, synthetic construct
  source 1..19: mol_type = other RNA
gggtgggtgctgctaaaac

SEQ ID NO: 769 - RNA, 19 nt, synthetic construct
  source 1..19: mol_type = other RNA
ggtgggtgctgctaaaact

SEQ ID NO: 770 - RNA, 19 nt, synthetic construct
  source 1..19: mol_type = other RNA
gtgggtgctgctaaaactg

SEQ ID NO: 771 - RNA, 19 nt, synthetic construct
  source 1..19: mol_type = other RNA
tgggtgctgctaaaactgt

SEQ ID NO: 772 - RNA, 19 nt, synthetic construct
  source 1..19: mol_type = other RNA
gggtgctgctaaaactgtt

SEQ ID NO: 773 - RNA, 19 nt, synthetic construct
  source 1..19: mol_type = other RNA
ggtgctgctaaaactgttc

SEQ ID NO: 774 - RNA, 19 nt, synthetic construct
  source 1..19: mol_type = other RNA
gtgctgctaaaactgttca

SEQ ID NO: 775 - RNA, 19 nt, synthetic construct
  source 1..19: mol_type = other RNA
tgctgctaaaactgttcaa

SEQ ID NO: 776 - RNA, 19 nt, synthetic construct
  source 1..19: mol_type = other RNA
gctgctaaaactgttcaac

SEQ ID NO: 777 - RNA, 19 nt, synthetic construct
  source 1..19: mol_type = other RNA
ctgctaaaactgttcaaca

SEQ ID NO: 778 - RNA, 19 nt, synthetic construct
  source 1..19: mol_type = other RNA
tgctaaaactgttcaacag

SEQ ID NO: 779 - RNA, 19 nt, synthetic construct
  source 1..19: mol_type = other RNA
gctaaaactgttcaacagc

SEQ ID NO: 780 - RNA, 19 nt, synthetic construct
  source 1..19: mol_type = other RNA
ctaaaactgttcaacagct

SEQ ID NO: 781 - RNA, 19 nt, synthetic construct
  source 1..19: mol_type = other RNA
taaaactgttcaacagctt

SEQ ID NO: 782 - RNA, 19 nt, synthetic construct
  source 1..19: mol_type = other RNA
aaaactgttcaacagcttc

SEQ ID NO: 783 - RNA, 19 nt, synthetic construct
  source 1..19: mol_type = other RNA
aaactgttcaacagcttct

SEQ ID NO: 784 - RNA, 19 nt, synthetic construct
  source 1..19: mol_type = other RNA
aactgttcaacagcttctt

SEQ ID NO: 785 - RNA, 19 nt, synthetic construct
  source 1..19: mol_type = other RNA
actgttcaacagcttcttt

SEQ ID NO: 786 - RNA, 19 nt, synthetic construct
  source 1..19: mol_type = other RNA
ctgttcaacagcttctttt

SEQ ID NO: 787 - RNA, 19 nt, synthetic construct
  source 1..19: mol_type = other RNA
tgttcaacagcttcttttg

SEQ ID NO: 788 - RNA, 19 nt, synthetic construct
  source 1..19: mol_type = other RNA
gttcaacagcttcttttgg

SEQ ID NO: 789 - RNA, 19 nt, synthetic construct
  source 1..19: mol_type = other RNA
ttcaacagcttcttttgga

SEQ ID NO: 790 - RNA, 19 nt, synthetic construct
  source 1..19: mol_type = other RNA
tcaacagcttcttttggaa

SEQ ID NO: 791 - RNA, 19 nt, synthetic construct
  source 1..19: mol_type = other RNA
caacagcttcttttggaac

SEQ ID NO: 792 - RNA, 19 nt, synthetic construct
  source 1..19: mol_type = other RNA
aacagcttcttttggaaca

SEQ ID NO: 793 - RNA, 19 nt, synthetic construct
  source 1..19: mol_type = other RNA
acagcttcttttggaacat

SEQ ID NO: 794 - RNA, 19 nt, synthetic construct
  source 1..19: mol_type = other RNA
cagcttcttttggaacatt

SEQ ID NO: 795 - RNA, 19 nt, synthetic construct
  source 1..19: mol_type = other RNA
agcttcttttggaacattc

SEQ ID NO: 796 - RNA, 19 nt, synthetic construct
  source 1..19: mol_type = other RNA
gcttcttttggaacattca

SEQ ID NO: 797 - RNA, 19 nt, synthetic construct
  source 1..19: mol_type = other RNA
cttcttttggaacattcaa

SEQ ID NO: 798 - RNA, 19 nt, synthetic construct
  source 1..19: mol_type = other RNA
ttcttttggaacattcaaa

SEQ ID NO: 799 - RNA, 19 nt, synthetic construct
  source 1..19: mol_type = other RNA
tcttttggaacattcaaat

SEQ ID NO: 800 - RNA, 19 nt, synthetic construct
  source 1..19: mol_type = other RNA
cttttggaacattcaaatt

SEQ ID NO: 801 - RNA, 19 nt, synthetic construct
  source 1..19: mol_type = other RNA
ttttggaacattcaaattc

SEQ ID NO: 802 - RNA, 19 nt, synthetic construct
  source 1..19: mol_type = other RNA
tttggaacattcaaattca

SEQ ID NO: 803 - RNA, 19 nt, synthetic construct
  source 1..19: mol_type = other RNA
ttggaacattcaaattcac

SEQ ID NO: 804 - RNA, 19 nt, synthetic construct
  source 1..19: mol_type = other RNA
tggaacattcaaattcaca

SEQ ID NO: 805 - RNA, 19 nt, synthetic construct
  source 1..19: mol_type = other RNA
ggaacattcaaattcacaa

SEQ ID NO: 806 - RNA, 19 nt, synthetic construct
  source 1..19: mol_type = other RNA
gaacattcaaattcacaaa

SEQ ID NO: 807 - RNA, 19 nt, synthetic construct
  source 1..19: mol_type = other RNA
aacattcaaattcacaaag

SEQ ID NO: 808 - RNA, 19 nt, synthetic construct
  source 1..19: mol_type = other RNA
acattcaaattcacaaagg

SEQ ID NO: 809 - RNA, 19 nt, synthetic construct
  source 1..19: mol_type = other RNA
cattcaaattcacaaaggt

SEQ ID NO: 810 - RNA, 19 nt, synthetic construct
  source 1..19: mol_type = other RNA
attcaaattcacaaaggtc

SEQ ID NO: 811 - RNA, 19 nt, synthetic construct
  source 1..19: mol_type = other RNA
ttcaaattcacaaaggtca

SEQ ID NO: 812 - RNA, 19 nt, synthetic construct
  source 1..19: mol_type = other RNA
tcaaattcacaaaggtcaa

SEQ ID NO: 813 - RNA, 19 nt, synthetic construct
  source 1..19: mol_type = other RNA
caaattcacaaaggtcaac

SEQ ID NO: 814 - RNA, 19 nt, synthetic construct
  source 1..19: mol_type = other RNA
aaattcacaaaggtcaact

SEQ ID NO: 815 - RNA, 19 nt, synthetic construct
  source 1..19: mol_type = other RNA
aattcacaaaggtcaactt

SEQ ID NO: 816 - RNA, 19 nt, synthetic construct
  source 1..19: mol_type = other RNA
attcacaaaggtcaacttg

SEQ ID NO: 817 - RNA, 19 nt, synthetic construct
  source 1..19: mol_type = other RNA
ttcacaaaggtcaacttga

SEQ ID NO: 818 - RNA, 19 nt, synthetic construct
  source 1..19: mol_type = other RNA
tcacaaaggtcaacttgag

SEQ ID NO: 819 - RNA, 19 nt, synthetic construct
  source 1..19: mol_type = other RNA
cacaaaggtcaacttgaga

SEQ ID NO: 820 - RNA, 19 nt, synthetic construct
  source 1..19: mol_type = other RNA
acaaaggtcaacttgagat

SEQ ID NO: 821 - RNA, 19 nt, synthetic construct
  source 1..19: mol_type = other RNA
caaaggtcaacttgagatg

SEQ ID NO: 822 - RNA, 19 nt, synthetic construct
  source 1..19: mol_type = other RNA
aaaggtcaacttgagatgg

SEQ ID NO: 823 - RNA, 19 nt, synthetic construct
  source 1..19: mol_type = other RNA
aaggtcaacttgagatggt

SEQ ID NO: 824 - RNA, 19 nt, synthetic construct
  source 1..19: mol_type = other RNA
aggtcaacttgagatggtt

SEQ ID NO: 825 - RNA, 19 nt, synthetic construct
  source 1..19: mol_type = other RNA
ggtcaacttgagatggtta

SEQ ID NO: 826 - RNA, 19 nt, synthetic construct
  source 1..19: mol_type = other RNA
gtcaacttgagatggttaa

SEQ ID NO: 827 - RNA, 19 nt, synthetic construct
  source 1..19: mol_type = other RNA
tcaacttgagatggttaaa

SEQ ID NO: 828 - RNA, 19 nt, synthetic construct
  source 1..19: mol_type = other RNA
caacttgagatggttaaag

SEQ ID NO: 829 - RNA, 19 nt, synthetic construct
  source 1..19: mol_type = other RNA
aacttgagatggttaaagc

SEQ ID NO: 830 - RNA, 19 nt, synthetic construct
  source 1..19: mol_type = other RNA
acttgagatggttaaagct

SEQ ID NO: 831 - RNA, 19 nt, synthetic construct
  source 1..19: mol_type = other RNA
cttgagatggttaaagctg

SEQ ID NO: 832 - RNA, 19 nt, synthetic construct
  source 1..19: mol_type = other RNA
ttgagatggttaaagctgc

SEQ ID NO: 833 - RNA, 19 nt, synthetic construct
  source 1..19: mol_type = other RNA
tgagatggttaaagctgca

SEQ ID NO: 834 - RNA, 19 nt, synthetic construct
  source 1..19: mol_type = other RNA
gagatggttaaagctgcaa

SEQ ID NO: 835 - RNA, 19 nt, synthetic construct
  source 1..19: mol_type = other RNA
agatggttaaagctgcaac

SEQ ID NO: 836 - RNA, 19 nt, synthetic construct
  source 1..19: mol_type = other RNA
gatggttaaagctgcaact

SEQ ID NO: 837 - RNA, 19 nt, synthetic construct
  source 1..19: mol_type = other RNA
atggttaaagctgcaactg

SEQ ID NO: 838 - RNA, 19 nt, synthetic construct
  source 1..19: mol_type = other RNA
tggttaaagctgcaactga

SEQ ID NO: 839 - RNA, 19 nt, synthetic construct
  source 1..19: mol_type = other RNA
ggttaaagctgcaactgag

SEQ ID NO: 840 - RNA, 19 nt, synthetic construct
  source 1..19: mol_type = other RNA
gttaaagctgcaactgaga

SEQ ID NO: 841 - RNA, 19 nt, synthetic construct
  source 1..19: mol_type = other RNA
ttaaagctgcaactgagac

SEQ ID NO: 842 - RNA, 19 nt, synthetic construct
  source 1..19: mol_type = other RNA
taaagctgcaactgagacg

SEQ ID NO: 843 - RNA, 19 nt, synthetic construct
  source 1..19: mol_type = other RNA
aaagctgcaactgagacga

SEQ ID NO: 844 - RNA, 19 nt, synthetic construct
  source 1..19: mol_type = other RNA
aagctgcaactgagacgaa

SEQ ID NO: 845 - RNA, 19 nt, synthetic construct
  source 1..19: mol_type = other RNA
agctgcaactgagacgaat

SEQ ID NO: 846 - RNA, 19 nt, synthetic construct
  source 1..19: mol_type = other RNA
gctgcaactgagacgaatt

SEQ ID NO: 847 - RNA, 19 nt, synthetic construct
  source 1..19: mol_type = other RNA
ctgcaactgagacgaattt

SEQ ID NO: 848 - RNA, 19 nt, synthetic construct
  source 1..19: mol_type = other RNA
tgcaactgagacgaatttg

SEQ ID NO: 849 - RNA, 19 nt, synthetic construct
  source 1..19: mol_type = other RNA
gcaactgagacgaatttgc

SEQ ID NO: 850 - RNA, 19 nt, synthetic construct
  source 1..19: mol_type = other RNA
caactgagacgaatttgcc

SEQ ID NO: 851 - RNA, 19 nt, synthetic construct
  source 1..19: mol_type = other RNA
aactgagacgaatttgccg

SEQ ID NO: 852 - RNA, 19 nt, synthetic construct
  source 1..19: mol_type = other RNA
actgagacgaatttgccgc

SEQ ID NO: 853 - RNA, 19 nt, synthetic construct
  source 1..19: mol_type = other RNA
ctgagacgaatttgccgct

SEQ ID NO: 854 - RNA, 19 nt, synthetic construct
  source 1..19: mol_type = other RNA
tgagacgaatttgccgctt

SEQ ID NO: 855 - RNA, 19 nt, synthetic construct
  source 1..19: mol_type = other RNA
gagacgaatttgccgcttc

SEQ ID NO: 856 - RNA, 19 nt, synthetic construct
  source 1..19: mol_type = other RNA
agacgaatttgccgcttct

SEQ ID NO: 857 - RNA, 19 nt, synthetic construct
  source 1..19: mol_type = other RNA
gacgaatttgccgcttctg

SEQ ID NO: 858 - RNA, 19 nt, synthetic construct
  source 1..19: mol_type = other RNA
acgaatttgccgcttctgt

SEQ ID NO: 859 - RNA, 19 nt, synthetic construct
  source 1..19: mol_type = other RNA
cgaatttgccgcttctgtt

SEQ ID NO: 860 - RNA, 19 nt, synthetic construct
  source 1..19: mol_type = other RNA
gaatttgccgcttctgttt

SEQ ID NO: 861 - RNA, 19 nt, synthetic construct
  source 1..19: mol_type = other RNA
aatttgccgcttctgtttc

SEQ ID NO: 862 - RNA, 19 nt, synthetic construct
  source 1..19: mol_type = other RNA
atttgccgcttctgtttct

SEQ ID NO: 863 - RNA, 19 nt, synthetic construct
  source 1..19: mol_type = other RNA
tttgccgcttctgtttcta

SEQ ID NO: 864 - RNA, 19 nt, synthetic construct
  source 1..19: mol_type = other RNA
ttgccgcttctgtttctac

SEQ ID NO: 865 - RNA, 19 nt, synthetic construct
  source 1..19: mol_type = other RNA
tgccgcttctgtttctacc

SEQ ID NO: 866 - RNA, 19 nt, synthetic construct
  source 1..19: mol_type = other RNA
gccgcttctgtttctacca

SEQ ID NO: 867 - RNA, 19 nt, synthetic construct
  source 1..19: mol_type = other RNA
ccgcttctgtttctaccag

SEQ ID NO: 868 - RNA, 19 nt, synthetic construct
  source 1..19: mol_type = other RNA
cgcttctgtttctaccagt

SEQ ID NO: 869 - RNA, 19 nt, synthetic construct
  source 1..19: mol_type = other RNA
gcttctgtttctaccagtt

SEQ ID NO: 870 - RNA, 19 nt, synthetic construct
  source 1..19: mol_type = other RNA
cttctgtttctaccagttc

SEQ ID NO: 871 - RNA, 19 nt, synthetic construct
  source 1..19: mol_type = other RNA
ttctgtttctaccagttca

SEQ ID NO: 872 - RNA, 19 nt, synthetic construct
  source 1..19: mol_type = other RNA
tctgtttctaccagttcat

SEQ ID NO: 873 - RNA, 19 nt, synthetic construct
  source 1..19: mol_type = other RNA
ctgtttctaccagttcata

SEQ ID NO: 874 - RNA, 19 nt, synthetic construct
  source 1..19: mol_type = other RNA
tgtttctaccagttcatag

SEQ ID NO: 875 - RNA, 19 nt, synthetic construct
  source 1..19: mol_type = other RNA
gtttctaccagttcataga

SEQ ID NO: 876 - RNA, 19 nt, synthetic construct
  source 1..19: mol_type = other RNA
tttctaccagttcatagat

SEQ ID NO: 877 - RNA, 19 nt, synthetic construct
  source 1..19: mol_type = other RNA
ttctaccagttcatagatc

SEQ ID NO: 878 - RNA, 19 nt, synthetic construct
  source 1..19: mol_type = other RNA
tctaccagttcatagatcc

SEQ ID NO: 879 - RNA, 19 nt, synthetic construct
  source 1..19: mol_type = other RNA
ctaccagttcatagatccc

SEQ ID NO: 880 - RNA, 19 nt, synthetic construct
  source 1..19: mol_type = other RNA
taccagttcatagatccca

SEQ ID NO: 881 - RNA, 19 nt, synthetic construct
  source 1..19: mol_type = other RNA
accagttcatagatcccat

SEQ ID NO: 882 - RNA, 19 nt, synthetic construct
  source 1..19: mol_type = other RNA
ccagttcatagatcccata

SEQ ID NO: 883 - RNA, 19 nt, synthetic construct
  source 1..19: mol_type = other RNA
cagttcatagatcccatat

SEQ ID NO: 884 - RNA, 19 nt, synthetic construct
  source 1..19: mol_type = other RNA
agttcatagatcccatatt

SEQ ID NO: 885 - RNA, 19 nt, synthetic construct
  source 1..19: mol_type = other RNA
gttcatagatcccatattg

SEQ ID NO: 886 - RNA, 19 nt, synthetic construct
  source 1..19: mol_type = other RNA
ttcatagatcccatattga

SEQ ID NO: 887 - RNA, 19 nt, synthetic construct
  source 1..19: mol_type = other RNA
tcatagatcccatattgac

SEQ ID NO: 888 - RNA, 19 nt, synthetic construct
  source 1..19: mol_type = other RNA
catagatcccatattgact

SEQ ID NO: 889 - RNA, 19 nt, synthetic construct
  source 1..19: mol_type = other RNA
atagatcccatattgacta

SEQ ID NO: 890 - RNA, 19 nt, synthetic construct
  source 1..19: mol_type = other RNA
tagatcccatattgactat

SEQ ID NO: 891 - RNA, 19 nt, synthetic construct
  source 1..19: mol_type = other RNA
agatcccatattgactatc

SEQ ID NO: 892 - RNA, 19 nt, synthetic construct
  source 1..19: mol_type = other RNA
gatcccatattgactatct

SEQ ID NO: 893 - RNA, 19 nt, synthetic construct
  source 1..19: mol_type = other RNA
atcccatattgactatctg

SEQ ID NO: 894 - RNA, 19 nt, synthetic construct
  source 1..19: mol_type = other RNA
tcccatattgactatctgc

SEQ ID NO: 895 - RNA, 19 nt, synthetic construct
  source 1..19: mol_type = other RNA
cccatattgactatctgct

SEQ ID NO: 896 - RNA, 19 nt, synthetic construct
  source 1..19: mol_type = other RNA
ccatattgactatctgctg

SEQ ID NO: 897 - RNA, 19 nt, synthetic construct
  source 1..19: mol_type = other RNA
catattgactatctgctgc

SEQ ID NO: 898 - RNA, 19 nt, synthetic construct
  source 1..19: mol_type = other RNA
atattgactatctgctgct

SEQ ID NO: 899 - RNA, 19 nt, synthetic construct
  source 1..19: mol_type = other RNA
tattgactatctgctgctc

SEQ ID NO: 900 - RNA, 19 nt, synthetic construct
  source 1..19: mol_type = other RNA
attgactatctgctgctca

SEQ ID NO: 901 - RNA, 19 nt, synthetic construct
  source 1..19: mol_type = other RNA
ttgactatctgctgctcac

SEQ ID NO: 902 - RNA, 19 nt, synthetic construct
  source 1..19: mol_type = other RNA
tgactatctgctgctcact

SEQ ID NO: 903 - RNA, 19 nt, synthetic construct
  source 1..19: mol_type = other RNA
gactatctgctgctcactt

SEQ ID NO: 904 - RNA, 19 nt, synthetic construct
  source 1..19: mol_type = other RNA
actatctgctgctcacttt

SEQ ID NO: 905 - RNA, 19 nt, synthetic construct
  source 1..19: mol_type = other RNA
ctatctgctgctcactttc

SEQ ID NO: 906 - RNA, 19 nt, synthetic construct
  source 1..19: mol_type = other RNA
tatctgctgctcactttca

SEQ ID NO: 907 - RNA, 19 nt, synthetic construct
  source 1..19: mol_type = other RNA
atctgctgctcactttcat

SEQ ID NO: 908 - RNA, 19 nt, synthetic construct
  source 1..19: mol_type = other RNA
tctgctgctcactttcatt

SEQ ID NO: 909 - RNA, 19 nt, synthetic construct
  source 1..19: mol_type = other RNA
ctgctgctcactttcattc

SEQ ID NO: 910 - RNA, 19 nt, synthetic construct
  source 1..19: mol_type = other RNA
tgctgctcactttcattct

SEQ ID NO: 911 - RNA, 19 nt, synthetic construct
  source 1..19: mol_type = other RNA
gctgctcactttcattctc

SEQ ID NO: 912 - RNA, 19 nt, synthetic construct
  source 1..19: mol_type = other RNA
ctgctcactttcattctct

SEQ ID NO: 913 - RNA, 19 nt, synthetic construct
  source 1..19: mol_type = other RNA
tgctcactttcattctctt

SEQ ID NO: 914 - RNA, 19 nt, synthetic construct
  source 1..19: mol_type = other RNA
gctcactttcattctcttc

SEQ ID NO: 915 - RNA, 19 nt, synthetic construct
  source 1..19: mol_type = other RNA
ctcactttcattctcttct

SEQ ID NO: 916 - RNA, 19 nt, synthetic construct
  source 1..19: mol_type = other RNA
tcactttcattctcttctg

SEQ ID NO: 917 - RNA, 19 nt, synthetic construct
  source 1..19: mol_type = other RNA
cactttcattctcttctgc

SEQ ID NO: 918 - RNA, 19 nt, synthetic construct
  source 1..19: mol_type = other RNA
actttcattctcttctgcc

SEQ ID NO: 919 - RNA, 19 nt, synthetic construct
  source 1..19: mol_type = other RNA
ctttcattctcttctgcca

SEQ ID NO: 920 - RNA, 19 nt, synthetic construct
  source 1..19: mol_type = other RNA
tttcattctcttctgccat

SEQ ID NO: 921 - RNA, 19 nt, synthetic construct
  source 1..19: mol_type = other RNA
ttcattctcttctgccata

SEQ ID NO: 922 - RNA, 19 nt, synthetic construct
  source 1..19: mol_type = other RNA
tcattctcttctgccataa

SEQ ID NO: 923 - RNA, 19 nt, synthetic construct
  source 1..19: mol_type = other RNA
cattctcttctgccataac

SEQ ID NO: 924 - RNA, 19 nt, synthetic construct
  source 1..19: mol_type = other RNA
attctcttctgccataaca

SEQ ID NO: 925 - RNA, 19 nt, synthetic construct
  source 1..19: mol_type = other RNA
ttctcttctgccataacat

SEQ ID NO: 926 - RNA, 19 nt, synthetic construct
  source 1..19: mol_type = other RNA
tctcttctgccataacatc

SEQ ID NO: 927 - RNA, 19 nt, synthetic construct
  source 1..19: mol_type = other RNA
ctcttctgccataacatca

SEQ ID NO: 928 - RNA, 19 nt, synthetic construct
  source 1..19: mol_type = other RNA
tcttctgccataacatcaa

SEQ ID NO: 929 - RNA, 19 nt, synthetic construct
  source 1..19: mol_type = other RNA
cttctgccataacatcaaa

SEQ ID NO: 930 - RNA, 19 nt, synthetic construct
  source 1..19: mol_type = other RNA
ttctgccataacatcaaag

SEQ ID NO: 931 - RNA, 19 nt, synthetic construct
  source 1..19: mol_type = other RNA
tctgccataacatcaaagc

SEQ ID NO: 932 - RNA, 19 nt, synthetic construct
  source 1..19: mol_type = other RNA
ctgccataacatcaaagca

SEQ ID NO: 933 - RNA, 19 nt, synthetic construct
  source 1..19: mol_type = other RNA
tgccataacatcaaagcac

SEQ ID NO: 934 - RNA, 19 nt, synthetic construct
  source 1..19: mol_type = other RNA
gccataacatcaaagcacc

SEQ ID NO: 935 - RNA, 19 nt, synthetic construct
  source 1..19: mol_type = other RNA
ccataacatcaaagcacca

SEQ ID NO: 936 - RNA, 19 nt, synthetic construct
  source 1..19: mol_type = other RNA
cataacatcaaagcaccat

SEQ ID NO: 937 - RNA, 19 nt, synthetic construct
  source 1..19: mol_type = other RNA
ataacatcaaagcaccata

SEQ ID NO: 938 - RNA, 19 nt, synthetic construct
  source 1..19: mol_type = other RNA
taacatcaaagcaccatac

SEQ ID NO: 939 - RNA, 19 nt, synthetic construct
  source 1..19: mol_type = other RNA
aacatcaaagcaccataca

SEQ ID NO: 940 - RNA, 19 nt, synthetic construct
  source 1..19: mol_type = other RNA
acatcaaagcaccatacat

SEQ ID NO: 941 - RNA, 19 nt, synthetic construct
  source 1..19: mol_type = other RNA
catcaaagcaccatacatt

SEQ ID NO: 942 - RNA, 19 nt, synthetic construct
  source 1..19: mol_type = other RNA
atcaaagcaccatacattg

SEQ ID NO: 943 - RNA, 19 nt, synthetic construct
  source 1..19: mol_type = other RNA
tcaaagcaccatacattgc

SEQ ID NO: 944 - RNA, 19 nt, synthetic construct
  source 1..19: mol_type = other RNA
caaagcaccatacattgct

SEQ ID NO: 945 - RNA, 19 nt, synthetic construct
  source 1..19: mol_type = other RNA
aaagcaccatacattgctt

SEQ ID NO: 946 - RNA, 19 nt, synthetic construct
  source 1..19: mol_type = other RNA
aagcaccatacattgcttc

SEQ ID NO: 947 - RNA, 19 nt, synthetic construct
  source 1..19: mol_type = other RNA
agcaccatacattgcttca

SEQ ID NO: 948 - RNA, 19 nt, synthetic construct
  source 1..19: mol_type = other RNA
gcaccatacattgcttcag

SEQ ID NO: 949 - RNA, 19 nt, synthetic construct
  source 1..19: mol_type = other RNA
caccatacattgcttcagg

SEQ ID NO: 950 - RNA, 19 nt, synthetic construct
  source 1..19: mol_type = other RNA
accatacattgcttcaggc

SEQ ID NO: 951 - RNA, 19 nt, synthetic construct
  source 1..19: mol_type = other RNA
ccatacattgcttcaggca

SEQ ID NO: 952 - RNA, 19 nt, synthetic construct
  source 1..19: mol_type = other RNA
catacattgcttcaggcaa

SEQ ID NO: 953 - RNA, 19 nt, synthetic construct
  source 1..19: mol_type = other RNA
atacattgcttcaggcaat

SEQ ID NO: 954 - RNA, 19 nt, synthetic construct
  source 1..19: mol_type = other RNA
tacattgcttcaggcaata

SEQ ID NO: 955 - RNA, 19 nt, synthetic construct
  source 1..19: mol_type = other RNA
acattgcttcaggcaataa

SEQ ID NO: 956 - RNA, 19 nt, synthetic construct
  source 1..19: mol_type = other RNA
cattgcttcaggcaataat

SEQ ID NO: 957 - RNA, 19 nt, synthetic construct
  source 1..19: mol_type = other RNA
attgcttcaggcaataatc

SEQ ID NO: 958 - RNA, 19 nt, synthetic construct
  source 1..19: mol_type = other RNA
ttgcttcaggcaataatct

SEQ ID NO: 959 - RNA, 19 nt, synthetic construct
  source 1..19: mol_type = other RNA
tgcttcaggcaataatctc

SEQ ID NO: 960 - RNA, 19 nt, synthetic construct
  source 1..19: mol_type = other RNA
gcttcaggcaataatctca

SEQ ID NO: 961 - RNA, 19 nt, synthetic construct
  source 1..19: mol_type = other RNA
cttcaggcaataatctcaa

SEQ ID NO: 962 - RNA, 19 nt, synthetic construct
  source 1..19: mol_type = other RNA
ttcaggcaataatctcaac

SEQ ID NO: 963 - RNA, 19 nt, synthetic construct
  source 1..19: mol_type = other RNA
tcaggcaataatctcaaca

SEQ ID NO: 964 - RNA, 19 nt, synthetic construct
  source 1..19: mol_type = other RNA
caggcaataatctcaacat

SEQ ID NO: 965 - RNA, 19 nt, synthetic construct
  source 1..19: mol_type = other RNA
aggcaataatctcaacatc

SEQ ID NO: 966 - RNA, 19 nt, synthetic construct
  source 1..19: mol_type = other RNA
ggcaataatctcaacatcc

SEQ ID NO: 967 - RNA, 19 nt, synthetic construct
  source 1..19: mol_type = other RNA
gcaataatctcaacatccc

SEQ ID NO: 968 - RNA, 19 nt, synthetic construct
  source 1..19: mol_type = other RNA
caataatctcaacatccca

SEQ ID NO: 969 - RNA, 19 nt, synthetic construct
  source 1..19: mol_type = other RNA
aataatctcaacatcccaa

SEQ ID NO: 970 - RNA, 19 nt, synthetic construct
  source 1..19: mol_type = other RNA
ataatctcaacatcccaat

SEQ ID NO: 971 - RNA, 19 nt, synthetic construct
  source 1..19: mol_type = other RNA
taatctcaacatcccaatc

SEQ ID NO: 972 - RNA, 19 nt, synthetic construct
  source 1..19: mol_type = other RNA
aatctcaacatcccaatct

SEQ ID NO: 973 - RNA, 19 nt, synthetic construct
  source 1..19: mol_type = other RNA
atctcaacatcccaatctt

SEQ ID NO: 974 - RNA, 19 nt, synthetic construct
  source 1..19: mol_type = other RNA
tctcaacatcccaatcttc

SEQ ID NO: 975 - RNA, 19 nt, synthetic construct
  source 1..19: mol_type = other RNA
ctcaacatcccaatcttca

SEQ ID NO: 976 - RNA, 19 nt, synthetic construct
  source 1..19: mol_type = other RNA
tcaacatcccaatcttcag

SEQ ID NO: 977 - RNA, 19 nt, synthetic construct
  source 1..19: mol_type = other RNA
caacatcccaatcttcagt

SEQ ID NO: 978 - RNA, 19 nt, synthetic construct
  source 1..19: mol_type = other RNA
aacatcccaatcttcagta

SEQ ID NO: 979 - RNA, 19 nt, synthetic construct
  source 1..19: mol_type = other RNA
acatcccaatcttcagtac

SEQ ID NO: 980 - RNA, 19 nt, synthetic construct
  source 1..19: mol_type = other RNA
catcccaatcttcagtacc

SEQ ID NO: 981 - RNA, 19 nt, synthetic construct
  source 1..19: mol_type = other RNA
atcccaatcttcagtacct

SEQ ID NO: 982 - RNA, 19 nt, synthetic construct
  source 1..19: mol_type = other RNA
tcccaatcttcagtacctt

SEQ ID NO: 983 - RNA, 19 nt, synthetic construct
  source 1..19: mol_type = other RNA
cccaatcttcagtaccttg

SEQ ID NO: 984 - RNA, 19 nt, synthetic construct
  source 1..19: mol_type = other RNA
ccaatcttcagtaccttga

SEQ ID NO: 985 - RNA, 19 nt, synthetic construct
  source 1..19: mol_type = other RNA
caatcttcagtaccttgat

SEQ ID NO: 986 - RNA, 19 nt, synthetic construct
  source 1..19: mol_type = other RNA
aatcttcagtaccttgatc

SEQ ID NO: 987 - RNA, 19 nt, synthetic construct
  source 1..19: mol_type = other RNA
atcttcagtaccttgatcc

SEQ ID NO: 988 - RNA, 19 nt, synthetic construct
  source 1..19: mol_type = other RNA
tcttcagtaccttgatcca

SEQ ID NO: 989 - RNA, 19 nt, synthetic construct
  source 1..19: mol_type = other RNA
cttcagtaccttgatccat

SEQ ID NO: 990 - RNA, 19 nt, synthetic construct
  source 1..19: mol_type = other RNA
ttcagtaccttgatccata

SEQ ID NO: 991 - RNA, 19 nt, synthetic construct
  source 1..19: mol_type = other RNA
tcagtaccttgatccataa

SEQ ID NO: 992 - RNA, 19 nt, synthetic construct
  source 1..19: mol_type = other RNA
cagtaccttgatccataag

SEQ ID NO: 993 - RNA, 19 nt, synthetic construct
  source 1..19: mol_type = other RNA
agtaccttgatccataagc

SEQ ID NO: 994 - RNA, 19 nt, synthetic construct
  source 1..19: mol_type = other RNA
gtaccttgatccataagct

SEQ ID NO: 995 - RNA, 19 nt, synthetic construct
  source 1..19: mol_type = other RNA
taccttgatccataagctt

SEQ ID NO: 996 - RNA, 19 nt, synthetic construct
  source 1..19: mol_type = other RNA
accttgatccataagcttg

SEQ ID NO: 997 - RNA, 19 nt, synthetic construct
  source 1..19: mol_type = other RNA
ccttgatccataagcttgg

SEQ ID NO: 998 - RNA, 19 nt, synthetic construct
  source 1..19: mol_type = other RNA
cttgatccataagcttggg

SEQ ID NO: 999 - RNA, 19 nt, synthetic construct
  source 1..19: mol_type = other RNA
ttgatccataagcttgggg

SEQ ID NO: 1000 - RNA, 19 nt, synthetic construct
  source 1..19: mol_type = other RNA
tgatccataagcttggggg

SEQ ID NO: 1001 - RNA, 19 nt, synthetic construct
  source 1..19: mol_type = other RNA
gatccataagcttgggggc

SEQ ID NO: 1002 - RNA, 19 nt, synthetic construct
  source 1..19: mol_type = other RNA
atccataagcttgggggct

SEQ ID NO: 1003 - RNA, 19 nt, synthetic construct
  source 1..19: mol_type = other RNA
tccataagcttgggggctt

SEQ ID NO: 1004 - RNA, 19 nt, synthetic construct
  source 1..19: mol_type = other RNA
ccataagcttgggggcttc

SEQ ID NO: 1005 - RNA, 19 nt, synthetic construct
  source 1..19: mol_type = other RNA
cataagcttgggggcttct

SEQ ID NO: 1006 - RNA, 19 nt, synthetic construct
  source 1..19: mol_type = other RNA
ataagcttgggggcttctt

SEQ ID NO: 1007 - RNA, 19 nt, synthetic construct
  source 1..19: mol_type = other RNA
taagcttgggggcttcttc

SEQ ID NO: 1008 - RNA, 19 nt, synthetic construct
  source 1..19: mol_type = other RNA
aagcttgggggcttcttca

SEQ ID NO: 1009 - RNA, 19 nt, synthetic construct
  source 1..19: mol_type = other RNA
agcttgggggcttcttcat

SEQ ID NO: 1010 - RNA, 19 nt, synthetic construct
  source 1..19: mol_type = other RNA
gcttgggggcttcttcata

SEQ ID NO: 1011 - RNA, 19 nt, synthetic construct
  source 1..19: mol_type = other RNA
cttgggggcttcttcatac

SEQ ID NO: 1012 - RNA, 19 nt, synthetic construct
  source 1..19: mol_type = other RNA
ttgggggcttcttcatacg

SEQ ID NO: 1013 - RNA, 19 nt, synthetic construct
  source 1..19: mol_type = other RNA
tgggggcttcttcatacga

SEQ ID NO: 1014 - RNA, 19 nt, synthetic construct
  source 1..19: mol_type = other RNA
gggggcttcttcatacgac

SEQ ID NO: 1015 - RNA, 19 nt, synthetic construct
  source 1..19: mol_type = other RNA
ggggcttcttcatacgacg

SEQ ID NO: 1016 - RNA, 19 nt, synthetic construct
  source 1..19: mol_type = other RNA
gggcttcttcatacgacga

SEQ ID NO: 1017 - RNA, 19 nt, synthetic construct
  source 1..19: mol_type = other RNA
ggcttcttcatacgacgaa

SEQ ID NO: 1018 - RNA, 19 nt, synthetic construct
  source 1..19: mol_type = other RNA
gcttcttcatacgacgaag

SEQ ID NO: 1019 - RNA, 19 nt, synthetic construct
  source 1..19: mol_type = other RNA
cttcttcatacgacgaagg

SEQ ID NO: 1020 - RNA, 19 nt, synthetic construct
  source 1..19: mol_type = other RNA
ttcttcatacgacgaaggc

SEQ ID NO: 1021 - RNA, 19 nt, synthetic construct
  source 1..19: mol_type = other RNA
tcttcatacgacgaaggct

SEQ ID NO: 1022 - RNA, 19 nt, synthetic construct
  source 1..19: mol_type = other RNA
cttcatacgacgaaggctc

SEQ ID NO: 1023 - RNA, 19 nt, synthetic construct
  source 1..19: mol_type = other RNA
ttcatacgacgaaggctcg

SEQ ID NO: 1024 - RNA, 19 nt, synthetic construct
  source 1..19: mol_type = other RNA
tcatacgacgaaggctcga

SEQ ID NO: 1025 - RNA, 19 nt, synthetic construct
  source 1..19: mol_type = other RNA
catacgacgaaggctcgat

SEQ ID NO: 1026 - RNA, 19 nt, synthetic construct
  source 1..19: mol_type = other RNA
atacgacgaaggctcgatg

SEQ ID NO: 1027 - RNA, 19 nt, synthetic construct
  source 1..19: mol_type = other RNA
tacgacgaaggctcgatga

SEQ ID NO: 1028 - RNA, 19 nt, synthetic construct
  source 1..19: mol_type = other RNA
acgacgaaggctcgatgaa

SEQ ID NO: 1029 - RNA, 19 nt, synthetic construct
  source 1..19: mol_type = other RNA
cgacgaaggctcgatgaaa

SEQ ID NO: 1030 - RNA, 19 nt, synthetic construct
  source 1..19: mol_type = other RNA
gacgaaggctcgatgaaac

SEQ ID NO: 1031 - RNA, 19 nt, synthetic construct
  source 1..19: mol_type = other RNA
acgaaggctcgatgaaaca

SEQ ID NO: 1032 - RNA, 19 nt, synthetic construct
  source 1..19: mol_type = other RNA
cgaaggctcgatgaaacac

SEQ ID NO: 1033 - RNA, 19 nt, synthetic construct
  source 1..19: mol_type = other RNA
gaaggctcgatgaaacacc

SEQ ID NO: 1034 - RNA, 19 nt, synthetic construct
  source 1..19: mol_type = other RNA
aaggctcgatgaaacacca

SEQ ID NO: 1035 - RNA, 19 nt, synthetic construct
  source 1..19: mol_type = other RNA
aggctcgatgaaacaccag

SEQ ID NO: 1036 - RNA, 19 nt, synthetic construct
  source 1..19: mol_type = other RNA
ggctcgatgaaacaccaga

SEQ ID NO: 1037 - RNA, 19 nt, synthetic construct
  source 1..19: mol_type = other RNA
gctcgatgaaacaccagat

SEQ ID NO: 1038 - RNA, 19 nt, synthetic construct
  source 1..19: mol_type = other RNA
ctcgatgaaacaccagatg

SEQ ID NO: 1039 - RNA, 19 nt, synthetic construct
  source 1..19: mol_type = other RNA
tcgatgaaacaccagatgg

SEQ ID NO: 1040 - RNA, 19 nt, synthetic construct
  source 1..19: mol_type = other RNA
cgatgaaacaccagatgga

SEQ ID NO: 1041 - RNA, 19 nt, synthetic construct
  source 1..19: mol_type = other RNA
gatgaaacaccagatggac

SEQ ID NO: 1042 - RNA, 19 nt, synthetic construct
  source 1..19: mol_type = other RNA
atgaaacaccagatggacg

SEQ ID NO: 1043 - RNA, 19 nt, synthetic construct
  source 1..19: mol_type = other RNA
tgaaacaccagatggacgg

SEQ ID NO: 1044 - RNA, 19 nt, synthetic construct
  source 1..19: mol_type = other RNA
gaaacaccagatggacgga

SEQ ID NO: 1045 - RNA, 19 nt, synthetic construct
  source 1..19: mol_type = other RNA
aaacaccagatggacggaa

SEQ ID NO: 1046 - RNA, 19 nt, synthetic construct
  source 1..19: mol_type = other RNA
aacaccagatggacggaaa

SEQ ID NO: 1047 - RNA, 19 nt, synthetic construct
  source 1..19: mol_type = other RNA
acaccagatggacggaaag

SEQ ID NO: 1048 - RNA, 19 nt, synthetic construct
  source 1..19: mol_type = other RNA
caccagatggacggaaaga

SEQ ID NO: 1049 - RNA, 19 nt, synthetic construct
  source 1..19: mol_type = other RNA
accagatggacggaaagat

SEQ ID NO: 1050 - RNA, 19 nt, synthetic construct
  source 1..19: mol_type = other RNA
ccagatggacggaaagatg

SEQ ID NO: 1051 - RNA, 19 nt, synthetic construct
  source 1..19: mol_type = other RNA
cagatggacggaaagatgt

SEQ ID NO: 1052 - RNA, 19 nt, synthetic construct
  source 1..19: mol_type = other RNA
agatggacggaaagatgtt

SEQ ID NO: 1053 - RNA, 19 nt, synthetic construct
  source 1..19: mol_type = other RNA
gatggacggaaagatgttc

SEQ ID NO: 1054 - RNA, 19 nt, synthetic construct
  source 1..19: mol_type = other RNA
atggacggaaagatgttct

SEQ ID NO: 1055 - RNA, 19 nt, synthetic construct
  source 1..19: mol_type = other RNA
tggacggaaagatgttctc

SEQ ID NO: 1056 - RNA, 19 nt, synthetic construct
  source 1..19: mol_type = other RNA
ggacggaaagatgttctct

SEQ ID NO: 1057 - RNA, 19 nt, synthetic construct
  source 1..19: mol_type = other RNA
gacggaaagatgttctcta

SEQ ID NO: 1058 - RNA, 19 nt, synthetic construct
  source 1..19: mol_type = other RNA
acggaaagatgttctctat

SEQ ID NO: 1059 - RNA, 19 nt, synthetic construct
  source 1..19: mol_type = other RNA
cggaaagatgttctctata

SEQ ID NO: 1060 - RNA, 19 nt, synthetic construct
  source 1..19: mol_type = other RNA
ggaaagatgttctctatag

SEQ ID NO: 1061 - RNA, 19 nt, synthetic construct
  source 1..19: mol_type = other RNA
gaaagatgttctctataga

SEQ ID NO: 1062 - RNA, 19 nt, synthetic construct
  source 1..19: mol_type = other RNA
aaagatgttctctatagag

SEQ ID NO: 1063 - RNA, 19 nt, synthetic construct
  source 1..19: mol_type = other RNA
aagatgttctctatagagc

SEQ ID NO: 1064 - RNA, 19 nt, synthetic construct
  source 1..19: mol_type = other RNA
agatgttctctatagagct

SEQ ID NO: 1065 - RNA, 19 nt, synthetic construct
  source 1..19: mol_type = other RNA
gatgttctctatagagctt

SEQ ID NO: 1066 - RNA, 19 nt, synthetic construct
  source 1..19: mol_type = other RNA
atgttctctatagagcttt

SEQ ID NO: 1067 - RNA, 19 nt, synthetic construct
  source 1..19: mol_type = other RNA
tgttctctatagagctttg

SEQ ID NO: 1068 - RNA, 19 nt, synthetic construct
  source 1..19: mol_type = other RNA
gttctctatagagctttgc

SEQ ID NO: 1069 - RNA, 19 nt, synthetic construct
  source 1..19: mol_type = other RNA
ttctctatagagctttgct

SEQ ID NO: 1070 - RNA, 19 nt, synthetic construct
  source 1..19: mol_type = other RNA
tctctatagagctttgctc

SEQ ID NO: 1071 - RNA, 19 nt, synthetic construct
  source 1..19: mol_type = other RNA
ctctatagagctttgctcc

SEQ ID NO: 1072 - RNA, 19 nt, synthetic construct
  source 1..19: mol_type = other RNA
tctatagagctttgctcca

SEQ ID NO: 1073 - RNA, 19 nt, synthetic construct
  source 1..19: mol_type = other RNA
ctatagagctttgctccat

SEQ ID NO: 1074 - RNA, 19 nt, synthetic construct
  source 1..19: mol_type = other RNA
tatagagctttgctccatg

SEQ ID NO: 1075 - RNA, 19 nt, synthetic construct
  source 1..19: mol_type = other RNA
atagagctttgctccatgg

SEQ ID NO: 1076 - RNA, 19 nt, synthetic construct
  source 1..19: mol_type = other RNA
tagagctttgctccatggg

SEQ ID NO: 1077 - RNA, 19 nt, synthetic construct
  source 1..19: mol_type = other RNA
agagctttgctccatgggc

SEQ ID NO: 1078 - RNA, 19 nt, synthetic construct
  source 1..19: mol_type = other RNA
gagctttgctccatgggca

SEQ ID NO: 1079 - RNA, 19 nt, synthetic construct
  source 1..19: mol_type = other RNA
agctttgctccatgggcat

SEQ ID NO: 1080 - RNA, 19 nt, synthetic construct
  source 1..19: mol_type = other RNA
gctttgctccatgggcata

SEQ ID NO: 1081 - RNA, 19 nt, synthetic construct
  source 1..19: mol_type = other RNA
ctttgctccatgggcatat

SEQ ID NO: 1082 - RNA, 19 nt, synthetic construct
  source 1..19: mol_type = other RNA
tttgctccatgggcatata

SEQ ID NO: 1083 - RNA, 19 nt, synthetic construct
  source 1..19: mol_type = other RNA
ttgctccatgggcatatag

SEQ ID NO: 1084 - RNA, 19 nt, synthetic construct
  source 1..19: mol_type = other RNA
tgctccatgggcatatagt

SEQ ID NO: 1085 - RNA, 19 nt, synthetic construct
  source 1..19: mol_type = other RNA
gctccatgggcatatagtt

SEQ ID NO: 1086 - RNA, 19 nt, synthetic construct
  source 1..19: mol_type = other RNA
ctccatgggcatatagttg

SEQ ID NO: 1087 - RNA, 19 nt, synthetic construct
  source 1..19: mol_type = other RNA
tccatgggcatatagttga

SEQ ID NO: 1088 - RNA, 19 nt, synthetic construct
  source 1..19: mol_type = other RNA
ccatgggcatatagttgaa

SEQ ID NO: 1089 - RNA, 19 nt, synthetic construct
  source 1..19: mol_type = other RNA
catgggcatatagttgaat

SEQ ID NO: 1090 - RNA, 19 nt, synthetic construct
  source 1..19: mol_type = other RNA
atgggcatatagttgaatt

SEQ ID NO: 1091 - RNA, 19 nt, synthetic construct
  source 1..19: mol_type = other RNA
tgggcatatagttgaatta

SEQ ID NO: 1092 - RNA, 19 nt, synthetic construct
  source 1..19: mol_type = other RNA
gggcatatagttgaattac

SEQ ID NO: 1093 - RNA, 19 nt, synthetic construct
  source 1..19: mol_type = other RNA
ggcatatagttgaattact

SEQ ID NO: 1094 - RNA, 19 nt, synthetic construct
  source 1..19: mol_type = other RNA
gcatatagttgaattactt

SEQ ID NO: 1095 - RNA, 19 nt, synthetic construct
  source 1..19: mol_type = other RNA
catatagttgaattacttc

SEQ ID NO: 1096 - RNA, 19 nt, synthetic construct
  source 1..19: mol_type = other RNA
atatagttgaattacttcg

SEQ ID NO: 1097 - RNA, 19 nt, synthetic construct
  source 1..19: mol_type = other RNA
tatagttgaattacttcga

SEQ ID NO: 1098 - RNA, 19 nt, synthetic construct
  source 1..19: mol_type = other RNA
atagttgaattacttcgac

SEQ ID NO: 1099 - RNA, 19 nt, synthetic construct
  source 1..19: mol_type = other RNA
tagttgaattacttcgaca

SEQ ID NO: 1100 - RNA, 19 nt, synthetic construct
  source 1..19: mol_type = other RNA
agttgaattacttcgacag

SEQ ID NO: 1101 - RNA, 19 nt, synthetic construct
  source 1..19: mol_type = other RNA
gttgaattacttcgacagc

SEQ ID NO: 1102 - RNA, 19 nt, synthetic construct
  source 1..19: mol_type = other RNA
ttgaattacttcgacagca

SEQ ID NO: 1103 - RNA, 19 nt, synthetic construct
  source 1..19: mol_type = other RNA
tgaattacttcgacagcag

SEQ ID NO: 1104 - RNA, 19 nt, synthetic construct
  source 1..19: mol_type = other RNA
gaattacttcgacagcagc

SEQ ID NO: 1105 - RNA, 19 nt, synthetic construct
  source 1..19: mol_type = other RNA
aattacttcgacagcagca

SEQ ID NO: 1106 - RNA, 19 nt, synthetic construct
  source 1..19: mol_type = other RNA
attacttcgacagcagcaa

SEQ ID NO: 1107 - RNA, 19 nt, synthetic construct
  source 1..19: mol_type = other RNA
ttacttcgacagcagcaat

SEQ ID NO: 1108 - RNA, 19 nt, synthetic construct
  source 1..19: mol_type = other RNA
tacttcgacagcagcaatt

SEQ ID NO: 1109 - RNA, 19 nt, synthetic construct
  source 1..19: mol_type = other RNA
acttcgacagcagcaattc

SEQ ID NO: 1110 - RNA, 19 nt, synthetic construct
  source 1..19: mol_type = other RNA
cttcgacagcagcaattct

SEQ ID NO: 1111 - RNA, 19 nt, synthetic construct
  source 1..19: mol_type = other RNA
ttcgacagcagcaattctt

SEQ ID NO: 1112 - RNA, 19 nt, synthetic construct
  source 1..19: mol_type = other RNA
tcgacagcagcaattcttg

SEQ ID NO: 1113 - RNA, 19 nt, synthetic construct
  source 1..19: mol_type = other RNA
cgacagcagcaattcttgg

SEQ ID NO: 1114 - RNA, 19 nt, synthetic construct
  source 1..19: mol_type = other RNA
gacagcagcaattcttgga

SEQ ID NO: 1115 - RNA, 19 nt, synthetic construct
  source 1..19: mol_type = other RNA
acagcagcaattcttggag

SEQ ID NO: 1116 - RNA, 19 nt, synthetic construct
  source 1..19: mol_type = other RNA
cagcagcaattcttggaga

SEQ ID NO: 1117 - RNA, 19 nt, synthetic construct
  source 1..19: mol_type = other RNA
agcagcaattcttggagat

SEQ ID NO: 1118 - RNA, 19 nt, synthetic construct
  source 1..19: mol_type = other RNA
gcagcaattcttggagatc

SEQ ID NO: 1119 - RNA, 19 nt, synthetic construct
  source 1..19: mol_type = other RNA
cagcaattcttggagatct

SEQ ID NO: 1120 - RNA, 19 nt, synthetic construct
  source 1..19: mol_type = other RNA
agcaattcttggagatctt

SEQ ID NO: 1121 - RNA, 19 nt, synthetic construct
  source 1..19: mol_type = other RNA
gcaattcttggagatcttc

SEQ ID NO: 1122 - RNA, 19 nt, synthetic construct
  source 1..19: mol_type = other RNA
caattcttggagatcttcc

SEQ ID NO: 1123 - RNA, 19 nt, synthetic construct
  source 1..19: mol_type = other RNA
aattcttggagatcttcct

SEQ ID NO: 1124 - RNA, 19 nt, synthetic construct
  source 1..19: mol_type = other RNA
attcttggagatcttcctg

SEQ ID NO: 1125 - RNA, 19 nt, synthetic construct
  source 1..19: mol_type = other RNA
ttcttggagatcttcctgg

SEQ ID NO: 1126 - RNA, 19 nt, synthetic construct
  source 1..19: mol_type = other RNA
tcttggagatcttcctgga

SEQ ID NO: 1127 - RNA, 19 nt, synthetic construct
  source 1..19: mol_type = other RNA
cttggagatcttcctggaa

SEQ ID NO: 1128 - RNA, 19 nt, synthetic construct
  source 1..19: mol_type = other RNA
ttggagatcttcctggaag

SEQ ID NO: 1129 - RNA, 19 nt, synthetic construct
  source 1..19: mol_type = other RNA
tggagatcttcctggaagg

SEQ ID NO: 1130 - RNA, 19 nt, synthetic construct
  source 1..19: mol_type = other RNA
ggagatcttcctggaaggc

SEQ ID NO: 1131 - RNA, 19 nt, synthetic construct
  source 1..19: mol_type = other RNA
gagatcttcctggaaggca

SEQ ID NO: 1132 - RNA, 19 nt, synthetic construct
  source 1..19: mol_type = other RNA
agatcttcctggaaggcac

SEQ ID NO: 1133 - RNA, 19 nt, synthetic construct
  source 1..19: mol_type = other RNA
gatcttcctggaaggcaca

SEQ ID NO: 1134 - RNA, 19 nt, synthetic construct
  source 1..19: mol_type = other RNA
atcttcctggaaggcacac

SEQ ID NO: 1135 - RNA, 19 nt, synthetic construct
  source 1..19: mol_type = other RNA
tcttcctggaaggcacacg

SEQ ID NO: 1136 - RNA, 19 nt, synthetic construct
  source 1..19: mol_type = other RNA
cttcctggaaggcacacgt

SEQ ID NO: 1137 - RNA, 19 nt, synthetic construct
  source 1..19: mol_type = other RNA
ttcctggaaggcacacgtt

SEQ ID NO: 1138 - RNA, 19 nt, synthetic construct
  source 1..19: mol_type = other RNA
tcctggaaggcacacgttc

SEQ ID NO: 1139 - RNA, 19 nt, synthetic construct
  source 1..19: mol_type = other RNA
cctggaaggcacacgttct

SEQ ID NO: 1140 - RNA, 19 nt, synthetic construct
  source 1..19: mol_type = other RNA
ctggaaggcacacgttcta

SEQ ID NO: 1141 - RNA, 19 nt, synthetic construct
  source 1..19: mol_type = other RNA
tggaaggcacacgttctag

SEQ ID NO: 1142 - RNA, 19 nt, synthetic construct
  source 1..19: mol_type = other RNA
ggaaggcacacgttctagg

SEQ ID NO: 1143 - RNA, 19 nt, synthetic construct
  source 1..19: mol_type = other RNA
gaaggcacacgttctagga

SEQ ID NO: 1144 - RNA, 19 nt, synthetic construct
  source 1..19: mol_type = other RNA
aaggcacacgttctaggag

SEQ ID NO: 1145 - RNA, 19 nt, synthetic construct
  source 1..19: mol_type = other RNA
aggcacacgttctaggagt

SEQ ID NO: 1146 - RNA, 19 nt, synthetic construct
  source 1..19: mol_type = other RNA
ggcacacgttctaggagtg

SEQ ID NO: 1147 - RNA, 19 nt, synthetic construct
  source 1..19: mol_type = other RNA
gcacacgttctaggagtgg

SEQ ID NO: 1148 - RNA, 19 nt, synthetic construct
  source 1..19: mol_type = other RNA
cacacgttctaggagtgga

SEQ ID NO: 1149 - RNA, 19 nt, synthetic construct
  source 1..19: mol_type = other RNA
acacgttctaggagtggaa

SEQ ID NO: 1150 - RNA, 19 nt, synthetic construct
  source 1..19: mol_type = other RNA
cacgttctaggagtggaaa

SEQ ID NO: 1151 - RNA, 19 nt, synthetic construct
  source 1..19: mol_type = other RNA
acgttctaggagtggaaaa

SEQ ID NO: 1152 - RNA, 19 nt, synthetic construct
  source 1..19: mol_type = other RNA
cgttctaggagtggaaaaa

SEQ ID NO: 1153 - RNA, 19 nt, synthetic construct
  source 1..19: mol_type = other RNA
gttctaggagtggaaaaac

SEQ ID NO: 1154 - RNA, 19 nt, synthetic construct
  source 1..19: mol_type = other RNA
ttctaggagtggaaaaacc

SEQ ID NO: 1155 - RNA, 19 nt, synthetic construct
  source 1..19: mol_type = other RNA
tctaggagtggaaaaacct

SEQ ID NO: 1156 - RNA, 19 nt, synthetic construct
  source 1..19: mol_type = other RNA
ctaggagtggaaaaacctc

SEQ ID NO: 1157 - RNA, 19 nt, synthetic construct
  source 1..19: mol_type = other RNA
taggagtggaaaaacctct

SEQ ID NO: 1158 - RNA, 19 nt, synthetic construct
  source 1..19: mol_type = other RNA
aggagtggaaaaacctctt

SEQ ID NO: 1159 - RNA, 19 nt, synthetic construct
  source 1..19: mol_type = other RNA
ggagtggaaaaacctcttg

SEQ ID NO: 1160 - RNA, 19 nt, synthetic construct
  source 1..19: mol_type = other RNA
gagtggaaaaacctcttgt

SEQ ID NO: 1161 - RNA, 19 nt, synthetic construct
  source 1..19: mol_type = other RNA
agtggaaaaacctcttgtg

SEQ ID NO: 1162 - RNA, 19 nt, synthetic construct
  source 1..19: mol_type = other RNA
gtggaaaaacctcttgtgc

SEQ ID NO: 1163 - RNA, 19 nt, synthetic construct
  source 1..19: mol_type = other RNA
tggaaaaacctcttgtgct

SEQ ID NO: 1164 - RNA, 19 nt, synthetic construct
  source 1..19: mol_type = other RNA
ggaaaaacctcttgtgctc

SEQ ID NO: 1165 - RNA, 19 nt, synthetic construct
  source 1..19: mol_type = other RNA
gaaaaacctcttgtgctcg

SEQ ID NO: 1166 - RNA, 19 nt, synthetic construct
  source 1..19: mol_type = other RNA
aaaaacctcttgtgctcgg

SEQ ID NO: 1167 - RNA, 19 nt, synthetic construct
  source 1..19: mol_type = other RNA
aaaacctcttgtgctcggg

SEQ ID NO: 1168 - RNA, 19 nt, synthetic construct
  source 1..19: mol_type = other RNA
aaacctcttgtgctcgggc

SEQ ID NO: 1169 - RNA, 19 nt, synthetic construct
  source 1..19: mol_type = other RNA
aacctcttgtgctcgggca

SEQ ID NO: 1170 - RNA, 19 nt, synthetic construct
  source 1..19: mol_type = other RNA
acctcttgtgctcgggcag

SEQ ID NO: 1171 - RNA, 19 nt, synthetic construct
  source 1..19: mol_type = other RNA
cctcttgtgctcgggcagg

SEQ ID NO: 1172 - RNA, 19 nt, synthetic construct
  source 1..19: mol_type = other RNA
ctcttgtgctcgggcagga

SEQ ID NO: 1173 - RNA, 19 nt, synthetic construct
  source 1..19: mol_type = other RNA
tcttgtgctcgggcaggac

SEQ ID NO: 1174 - RNA, 19 nt, synthetic construct
  source 1..19: mol_type = other RNA
cttgtgctcgggcaggact

SEQ ID NO: 1175 - RNA, 19 nt, synthetic construct
  source 1..19: mol_type = other RNA
ttgtgctcgggcaggactt

SEQ ID NO: 1176 - RNA, 19 nt, synthetic construct
  source 1..19: mol_type = other RNA
tgtgctcgggcaggacttt

SEQ ID NO: 1177 - RNA, 19 nt, synthetic construct
  source 1..19: mol_type = other RNA
gtgctcgggcaggactttt

SEQ ID NO: 1178 - RNA, 19 nt, synthetic construct
  source 1..19: mol_type = other RNA
tgctcgggcaggacttttg

SEQ ID NO: 1179 - RNA, 19 nt, synthetic construct
  source 1..19: mol_type = other RNA
gctcgggcaggacttttgt

SEQ ID NO: 1180 - RNA, 19 nt, synthetic construct
  source 1..19: mol_type = other RNA
ctcgggcaggacttttgtc

SEQ ID NO: 1181 - RNA, 19 nt, synthetic construct
  source 1..19: mol_type = other RNA
tcgggcaggacttttgtca

SEQ ID NO: 1182 - RNA, 19 nt, synthetic construct
  source 1..19: mol_type = other RNA
cgggcaggacttttgtcag

SEQ ID NO: 1183 - RNA, 19 nt, synthetic construct
  source 1..19: mol_type = other RNA
gggcaggacttttgtcagt

SEQ ID NO: 1184 - RNA, 19 nt, synthetic construct
  source 1..19: mol_type = other RNA
ggcaggacttttgtcagtt

SEQ ID NO: 1185 - RNA, 19 nt, synthetic construct
  source 1..19: mol_type = other RNA
gcaggacttttgtcagttg

SEQ ID NO: 1186 - RNA, 19 nt, synthetic construct
  source 1..19: mol_type = other RNA
caggacttttgtcagttgt

SEQ ID NO: 1187 - RNA, 19 nt, synthetic construct
  source 1..19: mol_type = other RNA
aggacttttgtcagttgtg

SEQ ID NO: 1188 - RNA, 19 nt, synthetic construct
  source 1..19: mol_type = other RNA
ggacttttgtcagttgtgg

SEQ ID NO: 1189 - RNA, 19 nt, synthetic construct
  source 1..19: mol_type = other RNA
gacttttgtcagttgtggt

SEQ ID NO: 1190 - RNA, 19 nt, synthetic construct
  source 1..19: mol_type = other RNA
acttttgtcagttgtggta

SEQ ID NO: 1191 - RNA, 19 nt, synthetic construct
  source 1..19: mol_type = other RNA
cttttgtcagttgtggtag

SEQ ID NO: 1192 - RNA, 19 nt, synthetic construct
  source 1..19: mol_type = other RNA
ttttgtcagttgtggtaga

SEQ ID NO: 1193 - RNA, 19 nt, synthetic construct
  source 1..19: mol_type = other RNA
tttgtcagttgtggtagat

SEQ ID NO: 1194 - RNA, 19 nt, synthetic construct
  source 1..19: mol_type = other RNA
ttgtcagttgtggtagata

SEQ ID NO: 1195 - RNA, 19 nt, synthetic construct
  source 1..19: mol_type = other RNA
tgtcagttgtggtagatac

SEQ ID NO: 1196 - RNA, 19 nt, synthetic construct
  source 1..19: mol_type = other RNA
gtcagttgtggtagatact

SEQ ID NO: 1197 - RNA, 19 nt, synthetic construct
  source 1..19: mol_type = other RNA
tcagttgtggtagatactc

SEQ ID NO: 1198 - RNA, 19 nt, synthetic construct
  source 1..19: mol_type = other RNA
cagttgtggtagatactct

SEQ ID NO: 1199 - RNA, 19 nt, synthetic construct
  source 1..19: mol_type = other RNA
agttgtggtagatactctg

SEQ ID NO: 1200 - RNA, 19 nt, synthetic construct
  source 1..19: mol_type = other RNA
gttgtggtagatactctgt

SEQ ID NO: 1201 - RNA, 19 nt, synthetic construct
  source 1..19: mol_type = other RNA
ttgtggtagatactctgtc

SEQ ID NO: 1202 - RNA, 19 nt, synthetic construct
  source 1..19: mol_type = other RNA
tgtggtagatactctgtct

SEQ ID NO: 1203 - RNA, 19 nt, synthetic construct
  source 1..19: mol_type = other RNA
gtggtagatactctgtcta

SEQ ID NO: 1204 - RNA, 19 nt, synthetic construct
  source 1..19: mol_type = other RNA
tggtagatactctgtctac

SEQ ID NO: 1205 - RNA, 19 nt, synthetic construct
  source 1..19: mol_type = other RNA
ggtagatactctgtctacc

SEQ ID NO: 1206 - RNA, 19 nt, synthetic construct
  source 1..19: mol_type = other RNA
gtagatactctgtctacca

SEQ ID NO: 1207 - RNA, 19 nt, synthetic construct
  source 1..19: mol_type = other RNA
tagatactctgtctaccaa

SEQ ID NO: 1208 - RNA, 19 nt, synthetic construct
  source 1..19: mol_type = other RNA
agatactctgtctaccaat

SEQ ID NO: 1209 - RNA, 19 nt, synthetic construct
  source 1..19: mol_type = other RNA
gatactctgtctaccaatg

SEQ ID NO: 1210 - RNA, 19 nt, synthetic construct
  source 1..19: mol_type = other RNA
atactctgtctaccaatgt

SEQ ID NO: 1211 - RNA, 19 nt, synthetic construct
  source 1..19: mol_type = other RNA
tactctgtctaccaatgtc

SEQ ID NO: 1212 - RNA, 19 nt, synthetic construct
  source 1..19: mol_type = other RNA
actctgtctaccaatgtca

SEQ ID NO: 1213 - RNA, 19 nt, synthetic construct
  source 1..19: mol_type = other RNA
ctctgtctaccaatgtcat

SEQ ID NO: 1214 - RNA, 19 nt, synthetic construct
  source 1..19: mol_type = other RNA
tctgtctaccaatgtcatc

SEQ ID NO: 1215 - RNA, 19 nt, synthetic construct
  source 1..19: mol_type = other RNA
ctgtctaccaatgtcatcc

SEQ ID NO: 1216 - RNA, 19 nt, synthetic construct
  source 1..19: mol_type = other RNA
tgtctaccaatgtcatccc

SEQ ID NO: 1217 - RNA, 19 nt, synthetic construct
  source 1..19: mol_type = other RNA
gtctaccaatgtcatccca

SEQ ID NO: 1218 - RNA, 19 nt, synthetic construct
  source 1..19: mol_type = other RNA
tctaccaatgtcatcccag

SEQ ID NO: 1219 - RNA, 19 nt, synthetic construct
  source 1..19: mol_type = other RNA
ctaccaatgtcatcccaga

SEQ ID NO: 1220 - RNA, 19 nt, synthetic construct
  source 1..19: mol_type = other RNA
taccaatgtcatcccagac

SEQ ID NO: 1221 - RNA, 19 nt, synthetic construct
  source 1..19: mol_type = other RNA
accaatgtcatcccagaca

SEQ ID NO: 1222 - RNA, 19 nt, synthetic construct
  source 1..19: mol_type = other RNA
ccaatgtcatcccagacat

SEQ ID NO: 1223 - RNA, 19 nt, synthetic construct
  source 1..19: mol_type = other RNA
caatgtcatcccagacatc

SEQ ID NO: 1224 - RNA, 19 nt, synthetic construct
  source 1..19: mol_type = other RNA
aatgtcatcccagacatct

SEQ ID NO: 1225 - RNA, 19 nt, synthetic construct
  source 1..19: mol_type = other RNA
atgtcatcccagacatctt

SEQ ID NO: 1226 - RNA, 19 nt, synthetic construct
  source 1..19: mol_type = other RNA
tgtcatcccagacatcttg

SEQ ID NO: 1227 - RNA, 19 nt, synthetic construct
  source 1..19: mol_type = other RNA
gtcatcccagacatcttga

SEQ ID NO: 1228 - RNA, 19 nt, synthetic construct
  source 1..19: mol_type = other RNA
tcatcccagacatcttgat

SEQ ID NO: 1229 - RNA, 19 nt, synthetic construct
  source 1..19: mol_type = other RNA
catcccagacatcttgata

SEQ ID NO: 1230 - RNA, 19 nt, synthetic construct
  source 1..19: mol_type = other RNA
atcccagacatcttgataa

SEQ ID NO: 1231 - RNA, 19 nt, synthetic construct
  source 1..19: mol_type = other RNA
tcccagacatcttgataat

SEQ ID NO: 1232 - RNA, 19 nt, synthetic construct
  source 1..19: mol_type = other RNA
cccagacatcttgataata

SEQ ID NO: 1233 - RNA, 19 nt, synthetic construct
  source 1..19: mol_type = other RNA
ccagacatcttgataatac

SEQ ID NO: 1234 - RNA, 19 nt, synthetic construct
  source 1..19: mol_type = other RNA
cagacatcttgataatacc

SEQ ID NO: 1235 - RNA, 19 nt, synthetic construct
  source 1..19: mol_type = other RNA
agacatcttgataatacct

SEQ ID NO: 1236 - RNA, 19 nt, synthetic construct
  source 1..19: mol_type = other RNA
gacatcttgataatacctg

SEQ ID NO: 1237 - RNA, 19 nt, synthetic construct
  source 1..19: mol_type = other RNA
acatcttgataatacctgt

SEQ ID NO: 1238 - RNA, 19 nt, synthetic construct
  source 1..19: mol_type = other RNA
catcttgataatacctgtt

SEQ ID NO: 1239 - RNA, 19 nt, synthetic construct
  source 1..19: mol_type = other RNA
atcttgataatacctgttg

SEQ ID NO: 1240 - RNA, 19 nt, synthetic construct
  source 1..19: mol_type = other RNA
tcttgataatacctgttgg

SEQ ID NO: 1241 - RNA, 19 nt, synthetic construct
  source 1..19: mol_type = other RNA
cttgataatacctgttgga

SEQ ID NO: 1242 - RNA, 19 nt, synthetic construct
  source 1..19: mol_type = other RNA
ttgataatacctgttggaa

SEQ ID NO: 1243 - RNA, 19 nt, synthetic construct
  source 1..19: mol_type = other RNA
tgataatacctgttggaat

SEQ ID NO: 1244 - RNA, 19 nt, synthetic construct
  source 1..19: mol_type = other RNA
gataatacctgttggaatc

SEQ ID NO: 1245 - RNA, 19 nt, synthetic construct
  source 1..19: mol_type = other RNA
ataatacctgttggaatct

SEQ ID NO: 1246 - RNA, 19 nt, synthetic construct
  source 1..19: mol_type = other RNA
taatacctgttggaatctc

SEQ ID NO: 1247 - RNA, 19 nt, synthetic construct
  source 1..19: mol_type = other RNA
aatacctgttggaatctcc

SEQ ID NO: 1248 - RNA, 19 nt, synthetic construct
  source 1..19: mol_type = other RNA
atacctgttggaatctcct

SEQ ID NO: 1249 - RNA, 19 nt, synthetic construct
  source 1..19: mol_type = other RNA
tacctgttggaatctccta

SEQ ID NO: 1250 - RNA, 19 nt, synthetic construct
  source 1..19: mol_type = other RNA
acctgttggaatctcctat

SEQ ID NO: 1251 - RNA, 19 nt, synthetic construct
  source 1..19: mol_type = other RNA
cctgttggaatctcctatg

SEQ ID NO: 1252 - RNA, 19 nt, synthetic construct
  source 1..19: mol_type = other RNA
ctgttggaatctcctatga

SEQ ID NO: 1253 - RNA, 19 nt, synthetic construct
  source 1..19: mol_type = other RNA
tgttggaatctcctatgat

SEQ ID NO: 1254 - RNA, 19 nt, synthetic construct
  source 1..19: mol_type = other RNA
gttggaatctcctatgatc

SEQ ID NO: 1255 - RNA, 19 nt, synthetic construct
  source 1..19: mol_type = other RNA
ttggaatctcctatgatcg

SEQ ID NO: 1256 - RNA, 19 nt, synthetic construct
  source 1..19: mol_type = other RNA
tggaatctcctatgatcgc

SEQ ID NO: 1257 - RNA, 19 nt, synthetic construct
  source 1..19: mol_type = other RNA
ggaatctcctatgatcgca

SEQ ID NO: 1258 - RNA, 19 nt, synthetic construct
  source 1..19: mol_type = other RNA
gaatctcctatgatcgcat

SEQ ID NO: 1259 - RNA, 19 nt, synthetic construct
  source 1..19: mol_type = other RNA
aatctcctatgatcgcatt

SEQ ID NO: 1260 - RNA, 19 nt, synthetic construct
  source 1..19: mol_type = other RNA
atctcctatgatcgcatta

SEQ ID NO: 1261 - RNA, 19 nt, synthetic construct
  source 1..19: mol_type = other RNA
tctcctatgatcgcattat

SEQ ID NO: 1262 - RNA, 19 nt, synthetic construct
  source 1..19: mol_type = other RNA
ctcctatgatcgcattatc

SEQ ID NO: 1263 - RNA, 19 nt, synthetic construct
  source 1..19: mol_type = other RNA
tcctatgatcgcattatcg

SEQ ID NO: 1264 - RNA, 19 nt, synthetic construct
  source 1..19: mol_type = other RNA
cctatgatcgcattatcga

SEQ ID NO: 1265 - RNA, 19 nt, synthetic construct
  source 1..19: mol_type = other RNA
ctatgatcgcattatcgaa

SEQ ID NO: 1266 - RNA, 19 nt, synthetic construct
  source 1..19: mol_type = other RNA
tatgatcgcattatcgaag

SEQ ID NO: 1267 - RNA, 19 nt, synthetic construct
  source 1..19: mol_type = other RNA
atgatcgcattatcgaagg

SEQ ID NO: 1268 - RNA, 19 nt, synthetic construct
  source 1..19: mol_type = other RNA
tgatcgcattatcgaaggt

SEQ ID NO: 1269 - RNA, 19 nt, synthetic construct
  source 1..19: mol_type = other RNA
gatcgcattatcgaaggtc

SEQ ID NO: 1270 - RNA, 19 nt, synthetic construct
  source 1..19: mol_type = other RNA
atcgcattatcgaaggtca

SEQ ID NO: 1271 - RNA, 19 nt, synthetic construct
  source 1..19: mol_type = other RNA
tcgcattatcgaaggtcac

SEQ ID NO: 1272 - RNA, 19 nt, synthetic construct
  source 1..19: mol_type = other RNA
cgcattatcgaaggtcact

SEQ ID NO: 1273 - RNA, 19 nt, synthetic construct
  source 1..19: mol_type = other RNA
gcattatcgaaggtcacta

SEQ ID NO: 1274 - RNA, 19 nt, synthetic construct
  source 1..19: mol_type = other RNA
cattatcgaaggtcactac

SEQ ID NO: 1275 - RNA, 19 nt, synthetic construct
  source 1..19: mol_type = other RNA
attatcgaaggtcactaca

SEQ ID NO: 1276 - RNA, 19 nt, synthetic construct
  source 1..19: mol_type = other RNA
ttatcgaaggtcactacaa

SEQ ID NO: 1277 - RNA, 19 nt, synthetic construct
  source 1..19: mol_type = other RNA
tatcgaaggtcactacaat

SEQ ID NO: 1278 - RNA, 19 nt, synthetic construct
  source 1..19: mol_type = other RNA
atcgaaggtcactacaatg

SEQ ID NO: 1279 - RNA, 19 nt, synthetic construct
  source 1..19: mol_type = other RNA
tcgaaggtcactacaatgg

SEQ ID NO: 1280 - RNA, 19 nt, synthetic construct
  source 1..19: mol_type = other RNA
cgaaggtcactacaatggt

SEQ ID NO: 1281 - RNA, 19 nt, synthetic construct
  source 1..19: mol_type = other RNA
gaaggtcactacaatggtg

SEQ ID NO: 1282 - RNA, 19 nt, synthetic construct
  source 1..19: mol_type = other RNA
aaggtcactacaatggtga

SEQ ID NO: 1283 - RNA, 19 nt, synthetic construct
  source 1..19: mol_type = other RNA
aggtcactacaatggtgaa

SEQ ID NO: 1284 - RNA, 19 nt, synthetic construct
  source 1..19: mol_type = other RNA
ggtcactacaatggtgaac

SEQ ID NO: 1285 - RNA, 19 nt, synthetic construct
  source 1..19: mol_type = other RNA
gtcactacaatggtgaaca

SEQ ID NO: 1286 - RNA, 19 nt, synthetic construct
  source 1..19: mol_type = other RNA
tcactacaatggtgaacaa

SEQ ID NO: 1287 - RNA, 19 nt, synthetic construct
  source 1..19: mol_type = other RNA
cactacaatggtgaacaac

SEQ ID NO: 1288 - RNA, 19 nt, synthetic construct
  source 1..19: mol_type = other RNA
actacaatggtgaacaact

SEQ ID NO: 1289 - RNA, 19 nt, synthetic construct
  source 1..19: mol_type = other RNA
ctacaatggtgaacaactg

SEQ ID NO: 1290 - RNA, 19 nt, synthetic construct
  source 1..19: mol_type = other RNA
tacaatggtgaacaactgg

SEQ ID NO: 1291 - RNA, 19 nt, synthetic construct
  source 1..19: mol_type = other RNA
acaatggtgaacaactggg

SEQ ID NO: 1292 - RNA, 19 nt, synthetic construct
  source 1..19: mol_type = other RNA
caatggtgaacaactgggc

SEQ ID NO: 1293 - RNA, 19 nt, synthetic construct
  source 1..19: mol_type = other RNA
aatggtgaacaactgggca

SEQ ID NO: 1294 - RNA, 19 nt, synthetic construct
  source 1..19: mol_type = other RNA
atggtgaacaactgggcaa

SEQ ID NO: 1295 - RNA, 19 nt, synthetic construct
  source 1..19: mol_type = other RNA
tggtgaacaactgggcaaa

SEQ ID NO: 1296 - RNA, 19 nt, synthetic construct
  source 1..19: mol_type = other RNA
ggtgaacaactgggcaaac

SEQ ID NO: 1297 - RNA, 19 nt, synthetic construct
  source 1..19: mol_type = other RNA
gtgaacaactgggcaaacc

SEQ ID NO: 1298 - RNA, 19 nt, synthetic construct
  source 1..19: mol_type = other RNA
tgaacaactgggcaaacct

SEQ ID NO: 1299 - RNA, 19 nt, synthetic construct
  source 1..19: mol_type = other RNA
gaacaactgggcaaaccta

SEQ ID NO: 1300 - RNA, 19 nt, synthetic construct
  source 1..19: mol_type = other RNA
aacaactgggcaaacctaa

SEQ ID NO: 1301 - RNA, 19 nt, synthetic construct
  source 1..19: mol_type = other RNA
acaactgggcaaacctaag

SEQ ID NO: 1302 - RNA, 19 nt, synthetic construct
  source 1..19: mol_type = other RNA
caactgggcaaacctaaga

SEQ ID NO: 1303 - RNA, 19 nt, synthetic construct
  source 1..19: mol_type = other RNA
aactgggcaaacctaagaa

SEQ ID NO: 1304 - RNA, 19 nt, synthetic construct
  source 1..19: mol_type = other RNA
actgggcaaacctaagaag

SEQ ID NO: 1305 - RNA, 19 nt, synthetic construct
  source 1..19: mol_type = other RNA
ctgggcaaacctaagaaga

SEQ ID NO: 1306 - RNA, 19 nt, synthetic construct
  source 1..19: mol_type = other RNA
tgggcaaacctaagaagaa

SEQ ID NO: 1307 - RNA, 19 nt, synthetic construct
  source 1..19: mol_type = other RNA
gggcaaacctaagaagaat

SEQ ID NO: 1308 - RNA, 19 nt, synthetic construct
  source 1..19: mol_type = other RNA
ggcaaacctaagaagaatg

SEQ ID NO: 1309 - RNA, 19 nt, synthetic construct
  source 1..19: mol_type = other RNA
gcaaacctaagaagaatga

SEQ ID NO: 1310 - RNA, 19 nt, synthetic construct
  source 1..19: mol_type = other RNA
caaacctaagaagaatgag

SEQ ID NO: 1311 - RNA, 19 nt, synthetic construct
  source 1..19: mol_type = other RNA
aaacctaagaagaatgaga

SEQ ID NO: 1312 - RNA, 19 nt, synthetic construct
  source 1..19: mol_type = other RNA
aacctaagaagaatgagag

SEQ ID NO: 1313 - RNA, 19 nt, synthetic construct
  source 1..19: mol_type = other RNA
acctaagaagaatgagagc

SEQ ID NO: 1314 - RNA, 19 nt, synthetic construct
  source 1..19: mol_type = other RNA
cctaagaagaatgagagcc

SEQ ID NO: 1315 - RNA, 19 nt, synthetic construct
  source 1..19: mol_type = other RNA
ctaagaagaatgagagcct

SEQ ID NO: 1316 - RNA, 19 nt, synthetic construct
  source 1..19: mol_type = other RNA
taagaagaatgagagcctg

SEQ ID NO: 1317 - RNA, 19 nt, synthetic construct
  source 1..19: mol_type = other RNA
aagaagaatgagagcctgt

SEQ ID NO: 1318 - RNA, 19 nt, synthetic construct
  source 1..19: mol_type = other RNA
agaagaatgagagcctgtg

SEQ ID NO: 1319 - RNA, 19 nt, synthetic construct
  source 1..19: mol_type = other RNA
gaagaatgagagcctgtgg

SEQ ID NO: 1320 - RNA, 19 nt, synthetic construct
  source 1..19: mol_type = other RNA
aagaatgagagcctgtgga

SEQ ID NO: 1321 - RNA, 19 nt, synthetic construct
  source 1..19: mol_type = other RNA
agaatgagagcctgtggag

SEQ ID NO: 1322 - RNA, 19 nt, synthetic construct
  source 1..19: mol_type = other RNA
gaatgagagcctgtggagt

SEQ ID NO: 1323 - RNA, 19 nt, synthetic construct
  source 1..19: mol_type = other RNA
aatgagagcctgtggagtg

SEQ ID NO: 1324 - RNA, 19 nt, synthetic construct
  source 1..19: mol_type = other RNA
atgagagcctgtggagtgt

SEQ ID NO: 1325 - RNA, 19 nt, synthetic construct
  source 1..19: mol_type = other RNA
tgagagcctgtggagtgta

SEQ ID NO: 1326 - RNA, 19 nt, synthetic construct
  source 1..19: mol_type = other RNA
gagagcctgtggagtgtag

SEQ ID NO: 1327 - RNA, 19 nt, synthetic construct
  source 1..19: mol_type = other RNA
agagcctgtggagtgtagc

SEQ ID NO: 1328 - RNA, 19 nt, synthetic construct
  source 1..19: mol_type = other RNA
gagcctgtggagtgtagca

SEQ ID NO: 1329 - RNA, 19 nt, synthetic construct
  source 1..19: mol_type = other RNA
agcctgtggagtgtagcaa

SEQ ID NO: 1330 - RNA, 19 nt, synthetic construct
  source 1..19: mol_type = other RNA
gcctgtggagtgtagcaag

SEQ ID NO: 1331 - RNA, 19 nt, synthetic construct
  source 1..19: mol_type = other RNA
cctgtggagtgtagcaaga

SEQ ID NO: 1332 - RNA, 19 nt, synthetic construct
  source 1..19: mol_type = other RNA
ctgtggagtgtagcaagag

SEQ ID NO: 1333 - RNA, 19 nt, synthetic construct
  source 1..19: mol_type = other RNA
tgtggagtgtagcaagagg

SEQ ID NO: 1334 - RNA, 19 nt, synthetic construct
  source 1..19: mol_type = other RNA
gtggagtgtagcaagaggt

SEQ ID NO: 1335 - RNA, 19 nt, synthetic construct
  source 1..19: mol_type = other RNA
tggagtgtagcaagaggtg

SEQ ID NO: 1336 - RNA, 19 nt, synthetic construct
  source 1..19: mol_type = other RNA
ggagtgtagcaagaggtgt

SEQ ID NO: 1337 - RNA, 19 nt, synthetic construct
  source 1..19: mol_type = other RNA
gagtgtagcaagaggtgtt

SEQ ID NO: 1338 - RNA, 19 nt, synthetic construct
  source 1..19: mol_type = other RNA
agtgtagcaagaggtgtta

SEQ ID NO: 1339 - RNA, 19 nt, synthetic construct
  source 1..19: mol_type = other RNA
gtgtagcaagaggtgttat

SEQ ID NO: 1340 - RNA, 19 nt, synthetic construct
  source 1..19: mol_type = other RNA
tgtagcaagaggtgttatt

SEQ ID NO: 1341 - RNA, 19 nt, synthetic construct
  source 1..19: mol_type = other RNA
gtagcaagaggtgttatta

SEQ ID NO: 1342 - RNA, 19 nt, synthetic construct
  source 1..19: mol_type = other RNA
tagcaagaggtgttattag

SEQ ID NO: 1343 - RNA, 19 nt, synthetic construct
  source 1..19: mol_type = other RNA
agcaagaggtgttattaga

SEQ ID NO: 1344 - RNA, 19 nt, synthetic construct
  source 1..19: mol_type = other RNA
gcaagaggtgttattagaa

SEQ ID NO: 1345 - RNA, 19 nt, synthetic construct
  source 1..19: mol_type = other RNA
caagaggtgttattagaat

SEQ ID NO: 1346 - RNA, 19 nt, synthetic construct
  source 1..19: mol_type = other RNA
aagaggtgttattagaatg

SEQ ID NO: 1347 - RNA, 19 nt, synthetic construct
  source 1..19: mol_type = other RNA
agaggtgttattagaatgt

SEQ ID NO: 1348 - RNA, 19 nt, synthetic construct
  source 1..19: mol_type = other RNA
gaggtgttattagaatgtt

SEQ ID NO: 1349 - RNA, 19 nt, synthetic construct
  source 1..19: mol_type = other RNA
aggtgttattagaatgtta

SEQ ID NO: 1350 - RNA, 19 nt, synthetic construct
  source 1..19: mol_type = other RNA
ggtgttattagaatgttac

SEQ ID NO: 1351 - RNA, 19 nt, synthetic construct
  source 1..19: mol_type = other RNA
gtgttattagaatgttacg

SEQ ID NO: 1352 - RNA, 19 nt, synthetic construct
  source 1..19: mol_type = other RNA
tgttattagaatgttacga

SEQ ID NO: 1353 - RNA, 19 nt, synthetic construct
  source 1..19: mol_type = other RNA
gttattagaatgttacgaa

SEQ ID NO: 1354 - RNA, 19 nt, synthetic construct
  source 1..19: mol_type = other RNA
ttattagaatgttacgaaa

SEQ ID NO: 1355 - RNA, 19 nt, synthetic construct
  source 1..19: mol_type = other RNA
tattagaatgttacgaaaa

SEQ ID NO: 1356 - RNA, 19 nt, synthetic construct
  source 1..19: mol_type = other RNA
attagaatgttacgaaaaa

SEQ ID NO: 1357 - RNA, 19 nt, synthetic construct
  source 1..19: mol_type = other RNA
ttagaatgttacgaaaaaa

SEQ ID NO: 1358 - RNA, 19 nt, synthetic construct
  source 1..19: mol_type = other RNA
tagaatgttacgaaaaaac

SEQ ID NO: 1359 - RNA, 19 nt, synthetic construct
  source 1..19: mol_type = other RNA
agaatgttacgaaaaaact

SEQ ID NO: 1360 - RNA, 19 nt, synthetic construct
  source 1..19: mol_type = other RNA
gaatgttacgaaaaaacta

SEQ ID NO: 1361 - RNA, 19 nt, synthetic construct
  source 1..19: mol_type = other RNA
aatgttacgaaaaaactat

SEQ ID NO: 1362 - RNA, 19 nt, synthetic construct
  source 1..19: mol_type = other RNA
atgttacgaaaaaactatg

SEQ ID NO: 1363 - RNA, 19 nt, synthetic construct
  source 1..19: mol_type = other RNA
tgttacgaaaaaactatgg

SEQ ID NO: 1364 - RNA, 19 nt, synthetic construct
  source 1..19: mol_type = other RNA
gttacgaaaaaactatggt

SEQ ID NO: 1365 - RNA, 19 nt, synthetic construct
  source 1..19: mol_type = other RNA
ttacgaaaaaactatggtt

SEQ ID NO: 1366 - RNA, 19 nt, synthetic construct
  source 1..19: mol_type = other RNA
tacgaaaaaactatggttg

SEQ ID NO: 1367 - RNA, 19 nt, synthetic construct
  source 1..19: mol_type = other RNA
acgaaaaaactatggttgt

SEQ ID NO: 1368 - RNA, 19 nt, synthetic construct
  source 1..19: mol_type = other RNA
cgaaaaaactatggttgtg

SEQ ID NO: 1369 - RNA, 19 nt, synthetic construct
  source 1..19: mol_type = other RNA
gaaaaaactatggttgtgt

SEQ ID NO: 1370 - RNA, 19 nt, synthetic construct
  source 1..19: mol_type = other RNA
aaaaaactatggttgtgtc

SEQ ID NO: 1371 - RNA, 19 nt, synthetic construct
  source 1..19: mol_type = other RNA
aaaaactatggttgtgtcc

SEQ ID NO: 1372 - RNA, 19 nt, synthetic construct
  source 1..19: mol_type = other RNA
aaaactatggttgtgtccg

SEQ ID NO: 1373 - RNA, 19 nt, synthetic construct
  source 1..19: mol_type = other RNA
aaactatggttgtgtccga

SEQ ID NO: 1374 - RNA, 19 nt, synthetic construct
  source 1..19: mol_type = other RNA
aactatggttgtgtccgag

SEQ ID NO: 1375 - RNA, 19 nt, synthetic construct
  source 1..19: mol_type = other RNA
actatggttgtgtccgagt

SEQ ID NO: 1376 - RNA, 19 nt, synthetic construct
  source 1..19: mol_type = other RNA
ctatggttgtgtccgagtg

SEQ ID NO: 1377 - RNA, 19 nt, synthetic construct
  source 1..19: mol_type = other RNA
tatggttgtgtccgagtgg

SEQ ID NO: 1378 - RNA, 19 nt, synthetic construct
  source 1..19: mol_type = other RNA
atggttgtgtccgagtgga

SEQ ID NO: 1379 - RNA, 19 nt, synthetic construct
  source 1..19: mol_type = other RNA
tggttgtgtccgagtggat

SEQ ID NO: 1380 - RNA, 19 nt, synthetic construct
  source 1..19: mol_type = other RNA
ggttgtgtccgagtggatt

SEQ ID NO: 1381 - RNA, 19 nt, synthetic construct
  source 1..19: mol_type = other RNA
gttgtgtccgagtggattt

SEQ ID NO: 1382 - RNA, 19 nt, synthetic construct
  source 1..19: mol_type = other RNA
ttgtgtccgagtggatttt

SEQ ID NO: 1383 - RNA, 19 nt, synthetic construct
  source 1..19: mol_type = other RNA
tgtgtccgagtggattttg

SEQ ID NO: 1384 - RNA, 19 nt, synthetic construct
  source 1..19: mol_type = other RNA
gtgtccgagtggattttgc

SEQ ID NO: 1385 - RNA, 19 nt, synthetic construct
  source 1..19: mol_type = other RNA
tgtccgagtggattttgca

SEQ ID NO: 1386 - RNA, 19 nt, synthetic construct
  source 1..19: mol_type = other RNA
gtccgagtggattttgcac

SEQ ID NO: 1387 - RNA, 19 nt, synthetic construct
  source 1..19: mol_type = other RNA
tccgagtggattttgcaca

SEQ ID NO: 1388 - RNA, 19 nt, synthetic construct
  source 1..19: mol_type = other RNA
ccgagtggattttgcacag

SEQ ID NO: 1389 - RNA, 19 nt, synthetic construct
  source 1..19: mol_type = other RNA
cgagtggattttgcacagc

SEQ ID NO: 1390 - RNA, 19 nt, synthetic construct
  source 1..19: mol_type = other RNA
gagtggattttgcacagcc

SEQ ID NO: 1391 - RNA, 19 nt, synthetic construct
  source 1..19: mol_type = other RNA
agtggattttgcacagcca

SEQ ID NO: 1392 - RNA, 19 nt, synthetic construct
  source 1..19: mol_type = other RNA
gtggattttgcacagccat

SEQ ID NO: 1393 - RNA, 19 nt, synthetic construct
  source 1..19: mol_type = other RNA
tggattttgcacagccatt

SEQ ID NO: 1394 - RNA, 19 nt, synthetic construct
  source 1..19: mol_type = other RNA
ggattttgcacagccattt

SEQ ID NO: 1395 - RNA, 19 nt, synthetic construct
  source 1..19: mol_type = other RNA
gattttgcacagccatttt

SEQ ID NO: 1396 - RNA, 19 nt, synthetic construct
  source 1..19: mol_type = other RNA
attttgcacagccattttc

SEQ ID NO: 1397 - RNA, 19 nt, synthetic construct
  source 1..19: mol_type = other RNA
ttttgcacagccattttcc

SEQ ID NO: 1398 - RNA, 19 nt, synthetic construct
  source 1..19: mol_type = other RNA
tttgcacagccattttcct

SEQ ID NO: 1399 - RNA, 19 nt, synthetic construct
  source 1..19: mol_type = other RNA
ttgcacagccattttcctt

SEQ ID NO: 1400 - RNA, 19 nt, synthetic construct
  source 1..19: mol_type = other RNA
tgcacagccattttcctta

SEQ ID NO: 1401 - RNA, 19 nt, synthetic construct
  source 1..19: mol_type = other RNA
gcacagccattttccttaa

SEQ ID NO: 1402 - RNA, 19 nt, synthetic construct
  source 1..19: mol_type = other RNA
cacagccattttccttaaa

SEQ ID NO: 1403 - RNA, 19 nt, synthetic construct
  source 1..19: mol_type = other RNA
acagccattttccttaaag

SEQ ID NO: 1404 - RNA, 19 nt, synthetic construct
  source 1..19: mol_type = other RNA
cagccattttccttaaagg

SEQ ID NO: 1405 - RNA, 19 nt, synthetic construct
  source 1..19: mol_type = other RNA
agccattttccttaaagga

SEQ ID NO: 1406 - RNA, 19 nt, synthetic construct
  source 1..19: mol_type = other RNA
gccattttccttaaaggaa

SEQ ID NO: 1407 - RNA, 19 nt, synthetic construct
  source 1..19: mol_type = other RNA
ccattttccttaaaggaat

SEQ ID NO: 1408 - RNA, 19 nt, synthetic construct
  source 1..19: mol_type = other RNA
cattttccttaaaggaata

SEQ ID NO: 1409 - RNA, 19 nt, synthetic construct
  source 1..19: mol_type = other RNA
attttccttaaaggaatat

SEQ ID NO: 1410 - RNA, 19 nt, synthetic construct
  source 1..19: mol_type = other RNA
ttttccttaaaggaatatt

SEQ ID NO: 1411 - RNA, 19 nt, synthetic construct
  source 1..19: mol_type = other RNA
tttccttaaaggaatattt

SEQ ID NO: 1412 - RNA, 19 nt, synthetic construct
  source 1..19: mol_type = other RNA
ttccttaaaggaatattta

SEQ ID NO: 1413 - RNA, 19 nt, synthetic construct
  source 1..19: mol_type = other RNA
tccttaaaggaatatttag

SEQ ID NO: 1414 - RNA, 19 nt, synthetic construct
  source 1..19: mol_type = other RNA
ccttaaaggaatatttaga

SEQ ID NO: 1415 - RNA, 19 nt, synthetic construct
  source 1..19: mol_type = other RNA
cttaaaggaatatttagaa

SEQ ID NO: 1416 - RNA, 19 nt, synthetic construct
  source 1..19: mol_type = other RNA
ttaaaggaatatttagaaa

SEQ ID NO: 1417 - RNA, 19 nt, synthetic construct
  source 1..19: mol_type = other RNA
taaaggaatatttagaaag

SEQ ID NO: 1418 - RNA, 19 nt, synthetic construct
  source 1..19: mol_type = other RNA
aaaggaatatttagaaagc

SEQ ID NO: 1419 - RNA, 19 nt, synthetic construct
  source 1..19: mol_type = other RNA
aaggaatatttagaaagcc

SEQ ID NO: 1420 - RNA, 19 nt, synthetic construct
  source 1..19: mol_type = other RNA
aggaatatttagaaagcca

SEQ ID NO: 1421 - RNA, 19 nt, synthetic construct
  source 1..19: mol_type = other RNA
ggaatatttagaaagccaa

SEQ ID NO: 1422 - RNA, 19 nt, synthetic construct
  source 1..19: mol_type = other RNA
gaatatttagaaagccaaa

SEQ ID NO: 1423 - RNA, 19 nt, synthetic construct
  source 1..19: mol_type = other RNA
aatatttagaaagccaaag

SEQ ID NO: 1424 - RNA, 19 nt, synthetic construct
  source 1..19: mol_type = other RNA
atatttagaaagccaaagt

SEQ ID NO: 1425 - RNA, 19 nt, synthetic construct
  source 1..19: mol_type = other RNA
tatttagaaagccaaagtc

SEQ ID NO: 1426 - RNA, 19 nt, synthetic construct
  source 1..19: mol_type = other RNA
atttagaaagccaaagtca

SEQ ID NO: 1427 - RNA, 19 nt, synthetic construct
  source 1..19: mol_type = other RNA
tttagaaagccaaagtcag

SEQ ID NO: 1428 - RNA, 19 nt, synthetic construct
  source 1..19: mol_type = other RNA
ttagaaagccaaagtcaga

SEQ ID NO: 1429 - RNA, 19 nt, synthetic construct
  source 1..19: mol_type = other RNA
tagaaagccaaagtcagaa

SEQ ID NO: 1430 - RNA, 19 nt, synthetic construct
  source 1..19: mol_type = other RNA
agaaagccaaagtcagaaa

SEQ ID NO: 1431 - RNA, 19 nt, synthetic construct
  source 1..19: mol_type = other RNA
gaaagccaaagtcagaaac

SEQ ID NO: 1432 - RNA, 19 nt, synthetic construct
  source 1..19: mol_type = other RNA
aaagccaaagtcagaaacc

SEQ ID NO: 1433 - RNA, 19 nt, synthetic construct
  source 1..19: mol_type = other RNA
aagccaaagtcagaaaccg

SEQ ID NO: 1434 - RNA, 19 nt, synthetic construct
  source 1..19: mol_type = other RNA
agccaaagtcagaaaccgg

SEQ ID NO: 1435 - RNA, 19 nt, synthetic construct
  source 1..19: mol_type = other RNA
gccaaagtcagaaaccggt

SEQ ID NO: 1436 - RNA, 19 nt, synthetic construct
  source 1..19: mol_type = other RNA
ccaaagtcagaaaccggtg

SEQ ID NO: 1437 - RNA, 19 nt, synthetic construct
  source 1..19: mol_type = other RNA
caaagtcagaaaccggtgt

SEQ ID NO: 1438 - RNA, 19 nt, synthetic construct
  source 1..19: mol_type = other RNA
aaagtcagaaaccggtgtc

SEQ ID NO: 1439 - RNA, 19 nt, synthetic construct
  source 1..19: mol_type = other RNA
aagtcagaaaccggtgtct

SEQ ID NO: 1440 - RNA, 19 nt, synthetic construct
  source 1..19: mol_type = other RNA
agtcagaaaccggtgtctg

SEQ ID NO: 1441 - RNA, 19 nt, synthetic construct
  source 1..19: mol_type = other RNA
gtcagaaaccggtgtctgc

SEQ ID NO: 1442 - RNA, 19 nt, synthetic construct
  source 1..19: mol_type = other RNA
tcagaaaccggtgtctgct

SEQ ID NO: 1443 - RNA, 19 nt, synthetic construct
  source 1..19: mol_type = other RNA
cagaaaccggtgtctgctc

SEQ ID NO: 1444 - RNA, 19 nt, synthetic construct
  source 1..19: mol_type = other RNA
agaaaccggtgtctgctct

SEQ ID NO: 1445 - RNA, 19 nt, synthetic construct
  source 1..19: mol_type = other RNA
gaaaccggtgtctgctcta

SEQ ID NO: 1446 - RNA, 19 nt, synthetic construct
  source 1..19: mol_type = other RNA
aaaccggtgtctgctctac

SEQ ID NO: 1447 - RNA, 19 nt, synthetic construct
  source 1..19: mol_type = other RNA
aaccggtgtctgctctact

SEQ ID NO: 1448 - RNA, 19 nt, synthetic construct
  source 1..19: mol_type = other RNA
accggtgtctgctctactt

SEQ ID NO: 1449 - RNA, 19 nt, synthetic construct
  source 1..19: mol_type = other RNA
ccggtgtctgctctacttt

SEQ ID NO: 1450 - RNA, 19 nt, synthetic construct
  source 1..19: mol_type = other RNA
cggtgtctgctctactttc

SEQ ID NO: 1451 - RNA, 19 nt, synthetic construct
  source 1..19: mol_type = other RNA
ggtgtctgctctactttcc

SEQ ID NO: 1452 - RNA, 19 nt, synthetic construct
  source 1..19: mol_type = other RNA
gtgtctgctctactttccc

SEQ ID NO: 1453 - RNA, 19 nt, synthetic construct
  source 1..19: mol_type = other RNA
tgtctgctctactttccct

SEQ ID NO: 1454 - RNA, 19 nt, synthetic construct
  source 1..19: mol_type = other RNA
gtctgctctactttccctg

SEQ ID NO: 1455 - RNA, 19 nt, synthetic construct
  source 1..19: mol_type = other RNA
tctgctctactttccctgg

SEQ ID NO: 1456 - RNA, 19 nt, synthetic construct
  source 1..19: mol_type = other RNA
ctgctctactttccctgga

SEQ ID NO: 1457 - RNA, 19 nt, synthetic construct
  source 1..19: mol_type = other RNA
tgctctactttccctggag

SEQ ID NO: 1458 - RNA, 19 nt, synthetic construct
  source 1..19: mol_type = other RNA
gctctactttccctggagc

SEQ ID NO: 1459 - RNA, 19 nt, synthetic construct
  source 1..19: mol_type = other RNA
ctctactttccctggagca

SEQ ID NO: 1460 - RNA, 19 nt, synthetic construct
  source 1..19: mol_type = other RNA
tctactttccctggagcaa

SEQ ID NO: 1461 - RNA, 19 nt, synthetic construct
  source 1..19: mol_type = other RNA
ctactttccctggagcaag

SEQ ID NO: 1462 - RNA, 19 nt, synthetic construct
  source 1..19: mol_type = other RNA
tactttccctggagcaagc

SEQ ID NO: 1463 - RNA, 19 nt, synthetic construct
  source 1..19: mol_type = other RNA
actttccctggagcaagcg

SEQ ID NO: 1464 - RNA, 19 nt, synthetic construct
  source 1..19: mol_type = other RNA
ctttccctggagcaagcgt

SEQ ID NO: 1465 - RNA, 19 nt, synthetic construct
  source 1..19: mol_type = other RNA
tttccctggagcaagcgtt

SEQ ID NO: 1466 - RNA, 19 nt, synthetic construct
  source 1..19: mol_type = other RNA
ttccctggagcaagcgttg

SEQ ID NO: 1467 - RNA, 19 nt, synthetic construct
  source 1..19: mol_type = other RNA
tccctggagcaagcgttgt

SEQ ID NO: 1468 - RNA, 19 nt, synthetic construct
  source 1..19: mol_type = other RNA
ccctggagcaagcgttgtt

SEQ ID NO: 1469 - RNA, 19 nt, synthetic construct
  source 1..19: mol_type = other RNA
cctggagcaagcgttgtta

SEQ ID NO: 1470 - RNA, 19 nt, synthetic construct
  source 1..19: mol_type = other RNA
ctggagcaagcgttgttac

SEQ ID NO: 1471 - RNA, 19 nt, synthetic construct
  source 1..19: mol_type = other RNA
tggagcaagcgttgttacc

SEQ ID NO: 1472 - RNA, 19 nt, synthetic construct
  source 1..19: mol_type = other RNA
ggagcaagcgttgttacca

SEQ ID NO: 1473 - RNA, 19 nt, synthetic construct
  source 1..19: mol_type = other RNA
gagcaagcgttgttaccag

SEQ ID NO: 1474 - RNA, 19 nt, synthetic construct
  source 1..19: mol_type = other RNA
agcaagcgttgttaccagc

SEQ ID NO: 1475 - RNA, 19 nt, synthetic construct
  source 1..19: mol_type = other RNA
gcaagcgttgttaccagct

SEQ ID NO: 1476 - RNA, 19 nt, synthetic construct
  source 1..19: mol_type = other RNA
caagcgttgttaccagcta

SEQ ID NO: 1477 - RNA, 19 nt, synthetic construct
  source 1..19: mol_type = other RNA
aagcgttgttaccagctat

SEQ ID NO: 1478 - RNA, 19 nt, synthetic construct
  source 1..19: mol_type = other RNA
agcgttgttaccagctata

SEQ ID NO: 1479 - RNA, 19 nt, synthetic construct
  source 1..19: mol_type = other RNA
gcgttgttaccagctatac

SEQ ID NO: 1480 - RNA, 19 nt, synthetic construct
  source 1..19: mol_type = other RNA
cgttgttaccagctatact

SEQ ID NO: 1481 - RNA, 19 nt, synthetic construct
  source 1..19: mol_type = other RNA
gttgttaccagctatactt

SEQ ID NO: 1482 - RNA, 19 nt, synthetic construct
  source 1..19: mol_type = other RNA
ttgttaccagctatacttc

SEQ ID NO: 1483 - RNA, 19 nt, synthetic construct
  source 1..19: mol_type = other RNA
tgttaccagctatacttcc

SEQ ID NO: 1484 - RNA, 19 nt, synthetic construct
  source 1..19: mol_type = other RNA
gttaccagctatacttcct

SEQ ID NO: 1485 - RNA, 19 nt, synthetic construct
  source 1..19: mol_type = other RNA
ttaccagctatacttcctt

SEQ ID NO: 1486 - RNA, 19 nt, synthetic construct
  source 1..19: mol_type = other RNA
taccagctatacttccttc

SEQ ID NO: 1487 - RNA, 19 nt, synthetic construct
  source 1..19: mol_type = other RNA
accagctatacttccttca

SEQ ID NO: 1488 - RNA, 19 nt, synthetic construct
  source 1..19: mol_type = other RNA
ccagctatacttccttcaa

SEQ ID NO: 1489 - RNA, 19 nt, synthetic construct
  source 1..19: mol_type = other RNA
cagctatacttccttcaag

SEQ ID NO: 1490 - RNA, 19 nt, synthetic construct
  source 1..19: mol_type = other RNA
agctatacttccttcaaga

SEQ ID NO: 1491 - RNA, 19 nt, synthetic construct
  source 1..19: mol_type = other RNA
gctatacttccttcaagac

SEQ ID NO: 1492 - RNA, 19 nt, synthetic construct
  source 1..19: mol_type = other RNA
ctatacttccttcaagacc

SEQ ID NO: 1493 - RNA, 19 nt, synthetic construct
  source 1..19: mol_type = other RNA
tatacttccttcaagaccc

SEQ ID NO: 1494 - RNA, 19 nt, synthetic construct
  source 1..19: mol_type = other RNA
atacttccttcaagaccca

SEQ ID NO: 1495 - RNA, 19 nt, synthetic construct
  source 1..19: mol_type = other RNA
tacttccttcaagacccag

SEQ ID NO: 1496 - RNA, 19 nt, synthetic construct
  source 1..19: mol_type = other RNA
acttccttcaagacccagt

SEQ ID NO: 1497 - RNA, 19 nt, synthetic construct
  source 1..19: mol_type = other RNA
cttccttcaagacccagtg

SEQ ID NO: 1498 - RNA, 19 nt, synthetic construct
  source 1..19: mol_type = other RNA
ttccttcaagacccagtga

SEQ ID NO: 1499 - RNA, 19 nt, synthetic construct
  source 1..19: mol_type = other RNA
tccttcaagacccagtgat

SEQ ID NO: 1500 - RNA, 19 nt, synthetic construct
  source 1..19: mol_type = other RNA
ccttcaagacccagtgatg

SEQ ID NO: 1501 - RNA, 19 nt, synthetic construct
  source 1..19: mol_type = other RNA
cttcaagacccagtgatgc

SEQ ID NO: 1502 - RNA, 19 nt, synthetic construct
  source 1..19: mol_type = other RNA
ttcaagacccagtgatgct

SEQ ID NO: 1503 - RNA, 19 nt, synthetic construct
  source 1..19: mol_type = other RNA
tcaagacccagtgatgctg

SEQ ID NO: 1504 - RNA, 19 nt, synthetic construct
  source 1..19: mol_type = other RNA
caagacccagtgatgctgc

SEQ ID NO: 1505 - RNA, 19 nt, synthetic construct
  source 1..19: mol_type = other RNA
aagacccagtgatgctgct

SEQ ID NO: 1506 - RNA, 19 nt, synthetic construct
  source 1..19: mol_type = other RNA
agacccagtgatgctgctg

SEQ ID NO: 1507 - RNA, 19 nt, synthetic construct
  source 1..19: mol_type = other RNA
gacccagtgatgctgctga

SEQ ID NO: 1508 - RNA, 19 nt, synthetic construct
  source 1..19: mol_type = other RNA
acccagtgatgctgctgat

SEQ ID NO: 1509 - RNA, 19 nt, synthetic construct
  source 1..19: mol_type = other RNA
cccagtgatgctgctgatg

SEQ ID NO: 1510 - RNA, 19 nt, synthetic construct
  source 1..19: mol_type = other RNA
ccagtgatgctgctgatga

SEQ ID NO: 1511 - RNA, 19 nt, synthetic construct
  source 1..19: mol_type = other RNA
cagtgatgctgctgatgaa

SEQ ID NO: 1512 - RNA, 19 nt, synthetic construct
  source 1..19: mol_type = other RNA
agtgatgctgctgatgaag

SEQ ID NO: 1513 - RNA, 19 nt, synthetic construct
  source 1..19: mol_type = other RNA
gtgatgctgctgatgaagg

SEQ ID NO: 1514 - RNA, 19 nt, synthetic construct
  source 1..19: mol_type = other RNA
tgatgctgctgatgaaggt

SEQ ID NO: 1515 - RNA, 19 nt, synthetic construct
  source 1..19: mol_type = other RNA
gatgctgctgatgaaggta

SEQ ID NO: 1516 - RNA, 19 nt, synthetic construct
  source 1..19: mol_type = other RNA
atgctgctgatgaaggtag

SEQ ID NO: 1517 - RNA, 19 nt, synthetic construct
  source 1..19: mol_type = other RNA
tgctgctgatgaaggtaga

SEQ ID NO: 1518 - RNA, 19 nt, synthetic construct
  source 1..19: mol_type = other RNA
gctgctgatgaaggtagag

SEQ ID NO: 1519 - RNA, 19 nt, synthetic construct
  source 1..19: mol_type = other RNA
ctgctgatgaaggtagaga

SEQ ID NO: 1520 - RNA, 19 nt, synthetic construct
  source 1..19: mol_type = other RNA
tgctgatgaaggtagagac

SEQ ID NO: 1521 - RNA, 19 nt, synthetic construct
  source 1..19: mol_type = other RNA
gctgatgaaggtagagaca

SEQ ID NO: 1522 - RNA, 19 nt, synthetic construct
  source 1..19: mol_type = other RNA
ctgatgaaggtagagacac

SEQ ID NO: 1523 - RNA, 19 nt, synthetic construct
  source 1..19: mol_type = other RNA
tgatgaaggtagagacacg

SEQ ID NO: 1524 - RNA, 19 nt, synthetic construct
  source 1..19: mol_type = other RNA
gatgaaggtagagacacgt

SEQ ID NO: 1525 - RNA, 19 nt, synthetic construct
  source 1..19: mol_type = other RNA
atgaaggtagagacacgtc

SEQ ID NO: 1526 - RNA, 19 nt, synthetic construct
  source 1..19: mol_type = other RNA
tgaaggtagagacacgtcc

SEQ ID NO: 1527 - RNA, 19 nt, synthetic construct
  source 1..19: mol_type = other RNA
gaaggtagagacacgtcca

SEQ ID NO: 1528 - RNA, 19 nt, synthetic construct
  source 1..19: mol_type = other RNA
aaggtagagacacgtccat

SEQ ID NO: 1529 - RNA, 19 nt, synthetic construct
  source 1..19: mol_type = other RNA
aggtagagacacgtccatt

SEQ ID NO: 1530 - RNA, 19 nt, synthetic construct
  source 1..19: mol_type = other RNA
ggtagagacacgtccatta

SEQ ID NO: 1531 - RNA, 19 nt, synthetic construct
  source 1..19: mol_type = other RNA
gtagagacacgtccattaa

SEQ ID NO: 1532 - RNA, 19 nt, synthetic construct
  source 1..19: mol_type = other RNA
tagagacacgtccattaat

SEQ ID NO: 1533 - RNA, 19 nt, synthetic construct
  source 1..19: mol_type = other RNA
agagacacgtccattaatg

SEQ ID NO: 1534 - RNA, 19 nt, synthetic construct
  source 1..19: mol_type = other RNA
gagacacgtccattaatga

SEQ ID NO: 1535 - RNA, 19 nt, synthetic construct
  source 1..19: mol_type = other RNA
agacacgtccattaatgag

SEQ ID NO: 1536 - RNA, 19 nt, synthetic construct
  source 1..19: mol_type = other RNA
gacacgtccattaatgagt

SEQ ID NO: 1537 - RNA, 19 nt, synthetic construct
  source 1..19: mol_type = other RNA
acacgtccattaatgagtc

SEQ ID NO: 1538 - RNA, 19 nt, synthetic construct
  source 1..19: mol_type = other RNA
cacgtccattaatgagtcc

SEQ ID NO: 1539 - RNA, 19 nt, synthetic construct
  source 1..19: mol_type = other RNA
acgtccattaatgagtcca

SEQ ID NO: 1540 - RNA, 19 nt, synthetic construct
  source 1..19: mol_type = other RNA
cgtccattaatgagtccag

SEQ ID NO: 1541 - RNA, 19 nt, synthetic construct
  source 1..19: mol_type = other RNA
gtccattaatgagtccaga

SEQ ID NO: 1542 - RNA, 19 nt, synthetic construct
  source 1..19: mol_type = other RNA
tccattaatgagtccagaa

SEQ ID NO: 1543 - RNA, 19 nt, synthetic construct
  source 1..19: mol_type = other RNA
ccattaatgagtccagaaa

SEQ ID NO: 1544 - RNA, 19 nt, synthetic construct
  source 1..19: mol_type = other RNA
cattaatgagtccagaaat

SEQ ID NO: 1545 - RNA, 19 nt, synthetic construct
  source 1..19: mol_type = other RNA
attaatgagtccagaaatg

SEQ ID NO: 1546 - RNA, 19 nt, synthetic construct
  source 1..19: mol_type = other RNA
ttaatgagtccagaaatgc

SEQ ID NO: 1547 - RNA, 19 nt, synthetic construct
  source 1..19: mol_type = other RNA
taatgagtccagaaatgca

SEQ ID NO: 1548 - RNA, 19 nt, synthetic construct
  source 1..19: mol_type = other RNA
aatgagtccagaaatgcaa

SEQ ID NO: 1549 - RNA, 19 nt, synthetic construct
  source 1..19: mol_type = other RNA
atgagtccagaaatgcaac

SEQ ID NO: 1550 - RNA, 19 nt, synthetic construct
  source 1..19: mol_type = other RNA
tgagtccagaaatgcaaca

SEQ ID NO: 1551 - RNA, 19 nt, synthetic construct
  source 1..19: mol_type = other RNA
gagtccagaaatgcaacag

SEQ ID NO: 1552 - RNA, 19 nt, synthetic construct
  source 1..19: mol_type = other RNA
agtccagaaatgcaacaga

SEQ ID NO: 1553 - RNA, 19 nt, synthetic construct
  source 1..19: mol_type = other RNA
gtccagaaatgcaacagat

SEQ ID NO: 1554 - RNA, 19 nt, synthetic construct
  source 1..19: mol_type = other RNA
tccagaaatgcaacagatg

SEQ ID NO: 1555 - RNA, 19 nt, synthetic construct
  source 1..19: mol_type = other RNA
ccagaaatgcaacagatga

SEQ ID NO: 1556 - RNA, 19 nt, synthetic construct
  source 1..19: mol_type = other RNA
cagaaatgcaacagatgaa

SEQ ID NO: 1557 - RNA, 19 nt, synthetic construct
  source 1..19: mol_type = other RNA
agaaatgcaacagatgaat

SEQ ID NO: 1558 - RNA, 19 nt, synthetic construct
  source 1..19: mol_type = other RNA
gaaatgcaacagatgaatc

SEQ ID NO: 1559 - RNA, 19 nt, synthetic construct
  source 1..19: mol_type = other RNA
aaatgcaacagatgaatcc

SEQ ID NO: 1560 - RNA, 19 nt, synthetic construct
  source 1..19: mol_type = other RNA
aatgcaacagatgaatccc

SEQ ID NO: 1561 - RNA, 19 nt, synthetic construct
  source 1..19: mol_type = other RNA
atgcaacagatgaatccct

SEQ ID NO: 1562 - RNA, 19 nt, synthetic construct
  source 1..19: mol_type = other RNA
tgcaacagatgaatcccta

SEQ ID NO: 1563 - RNA, 19 nt, synthetic construct
  source 1..19: mol_type = other RNA
gcaacagatgaatccctac

SEQ ID NO: 1564 - RNA, 19 nt, synthetic construct
  source 1..19: mol_type = other RNA
caacagatgaatccctacg

SEQ ID NO: 1565 - RNA, 19 nt, synthetic construct
  source 1..19: mol_type = other RNA
aacagatgaatccctacga

SEQ ID NO: 1566 - RNA, 19 nt, synthetic construct
  source 1..19: mol_type = other RNA
acagatgaatccctacgaa

SEQ ID NO: 1567 - RNA, 19 nt, synthetic construct
  source 1..19: mol_type = other RNA
cagatgaatccctacgaag

SEQ ID NO: 1568 - RNA, 19 nt, synthetic construct
  source 1..19: mol_type = other RNA
agatgaatccctacgaagg

SEQ ID NO: 1569 - RNA, 19 nt, synthetic construct
  source 1..19: mol_type = other RNA
gatgaatccctacgaagga

SEQ ID NO: 1570 - RNA, 19 nt, synthetic construct
  source 1..19: mol_type = other RNA
atgaatccctacgaaggag

SEQ ID NO: 1571 - RNA, 19 nt, synthetic construct
  source 1..19: mol_type = other RNA
tgaatccctacgaaggagg

SEQ ID NO: 1572 - RNA, 19 nt, synthetic construct
  source 1..19: mol_type = other RNA
gaatccctacgaaggaggt

SEQ ID NO: 1573 - RNA, 19 nt, synthetic construct
  source 1..19: mol_type = other RNA
aatccctacgaaggaggtt

SEQ ID NO: 1574 - RNA, 19 nt, synthetic construct
  source 1..19: mol_type = other RNA
atccctacgaaggaggttg

SEQ ID NO: 1575 - RNA, 19 nt, synthetic construct
  source 1..19: mol_type = other RNA
tccctacgaaggaggttga

SEQ ID NO: 1576 - RNA, 19 nt, synthetic construct
  source 1..19: mol_type = other RNA
ccctacgaaggaggttgat

SEQ ID NO: 1577 - RNA, 19 nt, synthetic construct
  source 1..19: mol_type = other RNA
cctacgaaggaggttgatt

SEQ ID NO: 1578 - RNA, 19 nt, synthetic construct
  source 1..19: mol_type = other RNA
ctacgaaggaggttgattg

SEQ ID NO: 1579 - RNA, 19 nt, synthetic construct
  source 1..19: mol_type = other RNA
tacgaaggaggttgattgc

SEQ ID NO: 1580 - RNA, 19 nt, synthetic construct
  source 1..19: mol_type = other RNA
acgaaggaggttgattgca

SEQ ID NO: 1581 - RNA, 19 nt, synthetic construct
  source 1..19: mol_type = other RNA
cgaaggaggttgattgcaa

SEQ ID NO: 1582 - RNA, 19 nt, synthetic construct
  source 1..19: mol_type = other RNA
gaaggaggttgattgcaaa

SEQ ID NO: 1583 - RNA, 19 nt, synthetic construct
  source 1..19: mol_type = other RNA
aaggaggttgattgcaaat

SEQ ID NO: 1584 - RNA, 19 nt, synthetic construct
  source 1..19: mol_type = other RNA
aggaggttgattgcaaatc

SEQ ID NO: 1585 - RNA, 19 nt, synthetic construct
  source 1..19: mol_type = other RNA
ggaggttgattgcaaatct

SEQ ID NO: 1586 - RNA, 19 nt, synthetic construct
  source 1..19: mol_type = other RNA
gaggttgattgcaaatctg

SEQ ID NO: 1587 - RNA, 19 nt, synthetic construct
  source 1..19: mol_type = other RNA
aggttgattgcaaatctgg

SEQ ID NO: 1588 - RNA, 19 nt, synthetic construct
  source 1..19: mol_type = other RNA
ggttgattgcaaatctggc

SEQ ID NO: 1589 - RNA, 19 nt, synthetic construct
  source 1..19: mol_type = other RNA
gttgattgcaaatctggct

SEQ ID NO: 1590 - RNA, 19 nt, synthetic construct
  source 1..19: mol_type = other RNA
ttgattgcaaatctggctg

SEQ ID NO: 1591 - RNA, 19 nt, synthetic construct
  source 1..19: mol_type = other RNA
tgattgcaaatctggctga

SEQ ID NO: 1592 - RNA, 19 nt, synthetic construct
  source 1..19: mol_type = other RNA
gattgcaaatctggctgag

SEQ ID NO: 1593 - RNA, 19 nt, synthetic construct
  source 1..19: mol_type = other RNA
attgcaaatctggctgagc

SEQ ID NO: 1594 - RNA, 19 nt, synthetic construct
  source 1..19: mol_type = other RNA
ttgcaaatctggctgagca

SEQ ID NO: 1595 - RNA, 19 nt, synthetic construct
  source 1..19: mol_type = other RNA
tgcaaatctggctgagcat

SEQ ID NO: 1596 - RNA, 19 nt, synthetic construct
  source 1..19: mol_type = other RNA
gcaaatctggctgagcata

SEQ ID NO: 1597 - RNA, 19 nt, synthetic construct
  source 1..19: mol_type = other RNA
caaatctggctgagcatat

SEQ ID NO: 1598 - RNA, 19 nt, synthetic construct
  source 1..19: mol_type = other RNA
aaatctggctgagcatatt

SEQ ID NO: 1599 - RNA, 19 nt, synthetic construct
  source 1..19: mol_type = other RNA
aatctggctgagcatattc

SEQ ID NO: 1600 - RNA, 19 nt, synthetic construct
  source 1..19: mol_type = other RNA
atctggctgagcatattct

SEQ ID NO: 1601 - RNA, 19 nt, synthetic construct
  source 1..19: mol_type = other RNA
tctggctgagcatattcta

SEQ ID NO: 1602 - RNA, 19 nt, synthetic construct
  source 1..19: mol_type = other RNA
ctggctgagcatattctat

SEQ ID NO: 1603 - RNA, 19 nt, synthetic construct
  source 1..19: mol_type = other RNA
tggctgagcatattctatt

SEQ ID NO: 1604 - RNA, 19 nt, synthetic construct
  source 1..19: mol_type = other RNA
ggctgagcatattctattc

SEQ ID NO: 1605 - RNA, 19 nt, synthetic construct
  source 1..19: mol_type = other RNA
gctgagcatattctattca

SEQ ID NO: 1606 - RNA, 19 nt, synthetic construct
  source 1..19: mol_type = other RNA
ctgagcatattctattcac

SEQ ID NO: 1607 - RNA, 19 nt, synthetic construct
  source 1..19: mol_type = other RNA
tgagcatattctattcact

SEQ ID NO: 1608 - RNA, 19 nt, synthetic construct
  source 1..19: mol_type = other RNA
gagcatattctattcactg

SEQ ID NO: 1609 - RNA, 19 nt, synthetic construct
  source 1..19: mol_type = other RNA
agcatattctattcactgc

SEQ ID NO: 1610 - RNA, 19 nt, synthetic construct
  source 1..19: mol_type = other RNA
gcatattctattcactgct

SEQ ID NO: 1611 - RNA, 19 nt, synthetic construct
  source 1..19: mol_type = other RNA
catattctattcactgcta

SEQ ID NO: 1612 - RNA, 19 nt, synthetic construct
  source 1..19: mol_type = other RNA
atattctattcactgctag

SEQ ID NO: 1613 - RNA, 19 nt, synthetic construct
  source 1..19: mol_type = other RNA
tattctattcactgctagc

SEQ ID NO: 1614 - RNA, 19 nt, synthetic construct
  source 1..19: mol_type = other RNA
attctattcactgctagca

SEQ ID NO: 1615 - RNA, 19 nt, synthetic construct
  source 1..19: mol_type = other RNA
ttctattcactgctagcaa

SEQ ID NO: 1616 - RNA, 19 nt, synthetic construct
  source 1..19: mol_type = other RNA
tctattcactgctagcaag

SEQ ID NO: 1617 - RNA, 19 nt, synthetic construct
  source 1..19: mol_type = other RNA
ctattcactgctagcaagt

SEQ ID NO: 1618 - RNA, 19 nt, synthetic construct
  source 1..19: mol_type = other RNA
tattcactgctagcaagtc

SEQ ID NO: 1619 - RNA, 19 nt, synthetic construct
  source 1..19: mol_type = other RNA
attcactgctagcaagtcc

SEQ ID NO: 1620 - RNA, 19 nt, synthetic construct
  source 1..19: mol_type = other RNA
ttcactgctagcaagtcct

SEQ ID NO: 1621 - RNA, 19 nt, synthetic construct
  source 1..19: mol_type = other RNA
tcactgctagcaagtcctg

SEQ ID NO: 1622 - RNA, 19 nt, synthetic construct
  source 1..19: mol_type = other RNA
cactgctagcaagtcctgt

SEQ ID NO: 1623 - RNA, 19 nt, synthetic construct
  source 1..19: mol_type = other RNA
actgctagcaagtcctgtg

SEQ ID NO: 1624 - RNA, 19 nt, synthetic construct
  source 1..19: mol_type = other RNA
ctgctagcaagtcctgtgc

SEQ ID NO: 1625 - RNA, 19 nt, synthetic construct
  source 1..19: mol_type = other RNA
tgctagcaagtcctgtgcc

SEQ ID NO: 1626 - RNA, 19 nt, synthetic construct
  source 1..19: mol_type = other RNA
gctagcaagtcctgtgcca

SEQ ID NO: 1627 - RNA, 19 nt, synthetic construct
  source 1..19: mol_type = other RNA
ctagcaagtcctgtgccat

SEQ ID NO: 1628 - RNA, 19 nt, synthetic construct
  source 1..19: mol_type = other RNA
tagcaagtcctgtgccatt

SEQ ID NO: 1629 - RNA, 19 nt, synthetic construct
  source 1..19: mol_type = other RNA
agcaagtcctgtgccatta

SEQ ID NO: 1630 - RNA, 19 nt, synthetic construct
  source 1..19: mol_type = other RNA
gcaagtcctgtgccattat

SEQ ID NO: 1631 - RNA, 19 nt, synthetic construct
  source 1..19: mol_type = other RNA
caagtcctgtgccattatg

SEQ ID NO: 1632 - RNA, 19 nt, synthetic construct
  source 1..19: mol_type = other RNA
aagtcctgtgccattatgt

SEQ ID NO: 1633 - RNA, 19 nt, synthetic construct
  source 1..19: mol_type = other RNA
agtcctgtgccattatgtc

SEQ ID NO: 1634 - RNA, 19 nt, synthetic construct
  source 1..19: mol_type = other RNA
gtcctgtgccattatgtcc

SEQ ID NO: 1635 - RNA, 19 nt, synthetic construct
  source 1..19: mol_type = other RNA
tcctgtgccattatgtcca

SEQ ID NO: 1636 - RNA, 19 nt, synthetic construct
  source 1..19: mol_type = other RNA
cctgtgccattatgtccac

SEQ ID NO: 1637 - RNA, 19 nt, synthetic construct
  source 1..19: mol_type = other RNA
ctgtgccattatgtccaca

SEQ ID NO: 1638 - RNA, 19 nt, synthetic construct
  source 1..19: mol_type = other RNA
tgtgccattatgtccacac

SEQ ID NO: 1639 - RNA, 19 nt, synthetic construct
  source 1..19: mol_type = other RNA
gtgccattatgtccacaca

SEQ ID NO: 1640 - RNA, 19 nt, synthetic construct
  source 1..19: mol_type = other RNA
tgccattatgtccacacac

SEQ ID NO: 1641 - RNA, 19 nt, synthetic construct
  source 1..19: mol_type = other RNA
gccattatgtccacacaca

SEQ ID NO: 1642 - RNA, 19 nt, synthetic construct
  source 1..19: mol_type = other RNA
ccattatgtccacacacat

SEQ ID NO: 1643 - RNA, 19 nt, synthetic construct
  source 1..19: mol_type = other RNA
cattatgtccacacacatt

SEQ ID NO: 1644 - RNA, 19 nt, synthetic construct
  source 1..19: mol_type = other RNA
attatgtccacacacattg

SEQ ID NO: 1645 - RNA, 19 nt, synthetic construct
  source 1..19: mol_type = other RNA
ttatgtccacacacattgt

SEQ ID NO: 1646 - RNA, 19 nt, synthetic construct
  source 1..19: mol_type = other RNA
tatgtccacacacattgtg

SEQ ID NO: 1647 - RNA, 19 nt, synthetic construct
  source 1..19: mol_type = other RNA
atgtccacacacattgtgg

SEQ ID NO: 1648 - RNA, 19 nt, synthetic construct
  source 1..19: mol_type = other RNA
tgtccacacacattgtggc

SEQ ID NO: 1649 - RNA, 19 nt, synthetic construct
  source 1..19: mol_type = other RNA
gtccacacacattgtggct

SEQ ID NO: 1650 - RNA, 19 nt, synthetic construct
  source 1..19: mol_type = other RNA
tccacacacattgtggctt

SEQ ID NO: 1651 - RNA, 19 nt, synthetic construct
  source 1..19: mol_type = other RNA
ccacacacattgtggcttg

SEQ ID NO: 1652 - RNA, 19 nt, synthetic construct
  source 1..19: mol_type = other RNA
cacacacattgtggcttgc

SEQ ID NO: 1653 - RNA, 19 nt, synthetic construct
  source 1..19: mol_type = other RNA
acacacattgtggcttgcc

SEQ ID NO: 1654 - RNA, 19 nt, synthetic construct
  source 1..19: mol_type = other RNA
cacacattgtggcttgcct

SEQ ID NO: 1655 - RNA, 19 nt, synthetic construct
  source 1..19: mol_type = other RNA
acacattgtggcttgcctg

SEQ ID NO: 1656 - RNA, 19 nt, synthetic construct
  source 1..19: mol_type = other RNA
cacattgtggcttgcctgc

SEQ ID NO: 1657 - RNA, 19 nt, synthetic construct
  source 1..19: mol_type = other RNA
acattgtggcttgcctgct

SEQ ID NO: 1658 - RNA, 19 nt, synthetic construct
  source 1..19: mol_type = other RNA
cattgtggcttgcctgctc

SEQ ID NO: 1659 - RNA, 19 nt, synthetic construct
  source 1..19: mol_type = other RNA
attgtggcttgcctgctcc

SEQ ID NO: 1660 - RNA, 19 nt, synthetic construct
  source 1..19: mol_type = other RNA
ttgtggcttgcctgctcct

SEQ ID NO: 1661 - RNA, 19 nt, synthetic construct
  source 1..19: mol_type = other RNA
tgtggcttgcctgctcctc

SEQ ID NO: 1662 - RNA, 19 nt, synthetic construct
  source 1..19: mol_type = other RNA
gtggcttgcctgctcctct

SEQ ID NO: 1663 - RNA, 19 nt, synthetic construct
  source 1..19: mol_type = other RNA
tggcttgcctgctcctcta

SEQ ID NO: 1664 - RNA, 19 nt, synthetic construct
  source 1..19: mol_type = other RNA
ggcttgcctgctcctctac

SEQ ID NO: 1665 - RNA, 19 nt, synthetic construct
  source 1..19: mol_type = other RNA
gcttgcctgctcctctaca

SEQ ID NO: 1666 - RNA, 19 nt, synthetic construct
  source 1..19: mol_type = other RNA
cttgcctgctcctctacag

SEQ ID NO: 1667 - RNA, 19 nt, synthetic construct
  source 1..19: mol_type = other RNA
ttgcctgctcctctacaga

SEQ ID NO: 1668 - RNA, 19 nt, synthetic construct
  source 1..19: mol_type = other RNA
tgcctgctcctctacagac

SEQ ID NO: 1669 - RNA, 19 nt, synthetic construct
  source 1..19: mol_type = other RNA
gcctgctcctctacagaca

SEQ ID NO: 1670 - RNA, 19 nt, synthetic construct
  source 1..19: mol_type = other RNA
cctgctcctctacagacac

SEQ ID NO: 1671 - RNA, 19 nt, synthetic construct
  source 1..19: mol_type = other RNA
ctgctcctctacagacaca

SEQ ID NO: 1672 - RNA, 19 nt, synthetic construct
  source 1..19: mol_type = other RNA
tgctcctctacagacacag

SEQ ID NO: 1673 - RNA, 19 nt, synthetic construct
  source 1..19: mol_type = other RNA
gctcctctacagacacagg

SEQ ID NO: 1674 - RNA, 19 nt, synthetic construct
  source 1..19: mol_type = other RNA
ctcctctacagacacaggc

SEQ ID NO: 1675 - RNA, 19 nt, synthetic construct
  source 1..19: mol_type = other RNA
tcctctacagacacaggca

SEQ ID NO: 1676 - RNA, 19 nt, synthetic construct
  source 1..19: mol_type = other RNA
cctctacagacacaggcag

SEQ ID NO: 1677 - RNA, 19 nt, synthetic construct
  source 1..19: mol_type = other RNA
ctctacagacacaggcagg

SEQ ID NO: 1678 - RNA, 19 nt, synthetic construct
  source 1..19: mol_type = other RNA
tctacagacacaggcaggg

SEQ ID NO: 1679 - RNA, 19 nt, synthetic construct
  source 1..19: mol_type = other RNA
ctacagacacaggcaggga

SEQ ID NO: 1680 - RNA, 19 nt, synthetic construct
  source 1..19: mol_type = other RNA
tacagacacaggcagggaa

SEQ ID NO: 1681 - RNA, 19 nt, synthetic construct
  source 1..19: mol_type = other RNA
acagacacaggcagggaat

SEQ ID NO: 1682 - RNA, 19 nt, synthetic construct
  source 1..19: mol_type = other RNA
cagacacaggcagggaatt

SEQ ID NO: 1683 - RNA, 19 nt, synthetic construct
  source 1..19: mol_type = other RNA
agacacaggcagggaattg

SEQ ID NO: 1684 - RNA, 19 nt, synthetic construct
  source 1..19: mol_type = other RNA
gacacaggcagggaattga

SEQ ID NO: 1685 - RNA, 19 nt, synthetic construct
  source 1..19: mol_type = other RNA
acacaggcagggaattgat

SEQ ID NO: 1686 - RNA, 19 nt, synthetic construct
  source 1..19: mol_type = other RNA
cacaggcagggaattgatc

SEQ ID NO: 1687 - RNA, 19 nt, synthetic construct
  source 1..19: mol_type = other RNA
acaggcagggaattgatct

SEQ ID NO: 1688 - RNA, 19 nt, synthetic construct
  source 1..19: mol_type = other RNA
caggcagggaattgatctc

SEQ ID NO: 1689 - RNA, 19 nt, synthetic construct
  source 1..19: mol_type = other RNA
aggcagggaattgatctct

SEQ ID NO: 1690 - RNA, 19 nt, synthetic construct
  source 1..19: mol_type = other RNA
ggcagggaattgatctctc

SEQ ID NO: 1691 - RNA, 19 nt, synthetic construct
  source 1..19: mol_type = other RNA
gcagggaattgatctctcc

SEQ ID NO: 1692 - RNA, 19 nt, synthetic construct
  source 1..19: mol_type = other RNA
cagggaattgatctctcca

SEQ ID NO: 1693 - RNA, 19 nt, synthetic construct
  source 1..19: mol_type = other RNA
agggaattgatctctccac

SEQ ID NO: 1694 - RNA, 19 nt, synthetic construct
  source 1..19: mol_type = other RNA
gggaattgatctctccaca

SEQ ID NO: 1695 - RNA, 19 nt, synthetic construct
  source 1..19: mol_type = other RNA
ggaattgatctctccacat

SEQ ID NO: 1696 - RNA, 19 nt, synthetic construct
  source 1..19: mol_type = other RNA
gaattgatctctccacatt

SEQ ID NO: 1697 - RNA, 19 nt, synthetic construct
  source 1..19: mol_type = other RNA
aattgatctctccacattg

SEQ ID NO: 1698 - RNA, 19 nt, synthetic construct
  source 1..19: mol_type = other RNA
attgatctctccacattgg

SEQ ID NO: 1699 - RNA, 19 nt, synthetic construct
  source 1..19: mol_type = other RNA
ttgatctctccacattggt

SEQ ID NO: 1700 - RNA, 19 nt, synthetic construct
  source 1..19: mol_type = other RNA
tgatctctccacattggtc

SEQ ID NO: 1701 - RNA, 19 nt, synthetic construct
  source 1..19: mol_type = other RNA
gatctctccacattggtcg

SEQ ID NO: 1702 - RNA, 19 nt, synthetic construct
  source 1..19: mol_type = other RNA
atctctccacattggtcga

SEQ ID NO: 1703 - RNA, 19 nt, synthetic construct
  source 1..19: mol_type = other RNA
tctctccacattggtcgaa

SEQ ID NO: 1704 - RNA, 19 nt, synthetic construct
  source 1..19: mol_type = other RNA
ctctccacattggtcgaag

SEQ ID NO: 1705 - RNA, 19 nt, synthetic construct
  source 1..19: mol_type = other RNA
tctccacattggtcgaaga

SEQ ID NO: 1706 - RNA, 19 nt, synthetic construct
  source 1..19: mol_type = other RNA
ctccacattggtcgaagac

SEQ ID NO: 1707 - RNA, 19 nt, synthetic construct
  source 1..19: mol_type = other RNA
tccacattggtcgaagact

SEQ ID NO: 1708 - RNA, 19 nt, synthetic construct
  source 1..19: mol_type = other RNA
ccacattggtcgaagactt

SEQ ID NO: 1709 - RNA, 19 nt, synthetic construct
  source 1..19: mol_type = other RNA
cacattggtcgaagacttc

SEQ ID NO: 1710 - RNA, 19 nt, synthetic construct
  source 1..19: mol_type = other RNA
acattggtcgaagacttct

SEQ ID NO: 1711 - RNA, 19 nt, synthetic construct
  source 1..19: mol_type = other RNA
cattggtcgaagacttctt

SEQ ID NO: 1712 - RNA, 19 nt, synthetic construct
  source 1..19: mol_type = other RNA
attggtcgaagacttcttt

SEQ ID NO: 1713 - RNA, 19 nt, synthetic construct
  source 1..19: mol_type = other RNA
ttggtcgaagacttctttg

SEQ ID NO: 1714 - RNA, 19 nt, synthetic construct
  source 1..19: mol_type = other RNA
tggtcgaagacttctttgt

SEQ ID NO: 1715 - RNA, 19 nt, synthetic construct
  source 1..19: mol_type = other RNA
ggtcgaagacttctttgtg

SEQ ID NO: 1716 - RNA, 19 nt, synthetic construct
  source 1..19: mol_type = other RNA
gtcgaagacttctttgtga

SEQ ID NO: 1717 - RNA, 19 nt, synthetic construct
  source 1..19: mol_type = other RNA
tcgaagacttctttgtgat

SEQ ID NO: 1718 - RNA, 19 nt, synthetic construct
  source 1..19: mol_type = other RNA
cgaagacttctttgtgatg

SEQ ID NO: 1719 - RNA, 19 nt, synthetic construct
  source 1..19: mol_type = other RNA
gaagacttctttgtgatga

SEQ ID NO: 1720 - RNA, 19 nt, synthetic construct
  source 1..19: mol_type = other RNA
aagacttctttgtgatgaa

SEQ ID NO: 1721 - RNA, 19 nt, synthetic construct
  source 1..19: mol_type = other RNA
agacttctttgtgatgaaa

SEQ ID NO: 1722 - RNA, 19 nt, synthetic construct
  source 1..19: mol_type = other RNA
gacttctttgtgatgaaag

SEQ ID NO: 1723 - RNA, 19 nt, synthetic construct
  source 1..19: mol_type = other RNA
acttctttgtgatgaaaga

SEQ ID NO: 1724 - RNA, 19 nt, synthetic construct
  source 1..19: mol_type = other RNA
cttctttgtgatgaaagag

SEQ ID NO: 1725 - RNA, 19 nt, synthetic construct
  source 1..19: mol_type = other RNA
ttctttgtgatgaaagagg

SEQ ID NO: 1726 - RNA, 19 nt, synthetic construct
  source 1..19: mol_type = other RNA
tctttgtgatgaaagagga

SEQ ID NO: 1727 - RNA, 19 nt, synthetic construct
  source 1..19: mol_type = other RNA
ctttgtgatgaaagaggaa

SEQ ID NO: 1728 - RNA, 19 nt, synthetic construct
  source 1..19: mol_type = other RNA
tttgtgatgaaagaggaag

SEQ ID NO: 1729 - RNA, 19 nt, synthetic construct
  source 1..19: mol_type = other RNA
ttgtgatgaaagaggaagt

SEQ ID NO: 1730 - RNA, 19 nt, synthetic construct
  source 1..19: mol_type = other RNA
tgtgatgaaagaggaagtc

SEQ ID NO: 1731 - RNA, 19 nt, synthetic construct
  source 1..19: mol_type = other RNA
gtgatgaaagaggaagtcc

SEQ ID NO: 1732 - RNA, 19 nt, synthetic construct
  source 1..19: mol_type = other RNA
tgatgaaagaggaagtcct

SEQ ID NO: 1733 - RNA, 19 nt, synthetic construct
  source 1..19: mol_type = other RNA
gatgaaagaggaagtcctg

SEQ ID NO: 1734 - RNA, 19 nt, synthetic construct
  source 1..19: mol_type = other RNA
atgaaagaggaagtcctgg

SEQ ID NO: 1735 - RNA, 19 nt, synthetic construct
  source 1..19: mol_type = other RNA
tgaaagaggaagtcctggc

SEQ ID NO: 1736 - RNA, 19 nt, synthetic construct
  source 1..19: mol_type = other RNA
gaaagaggaagtcctggct

SEQ ID NO: 1737 - RNA, 19 nt, synthetic construct
  source 1..19: mol_type = other RNA
aaagaggaagtcctggctc

SEQ ID NO: 1738 - RNA, 19 nt, synthetic construct
  source 1..19: mol_type = other RNA
aagaggaagtcctggctcg

SEQ ID NO: 1739 - RNA, 19 nt, synthetic construct
  source 1..19: mol_type = other RNA
agaggaagtcctggctcgt

SEQ ID NO: 1740 - RNA, 19 nt, synthetic construct
  source 1..19: mol_type = other RNA
gaggaagtcctggctcgtg

SEQ ID NO: 1741 - RNA, 19 nt, synthetic construct
  source 1..19: mol_type = other RNA
aggaagtcctggctcgtga

SEQ ID NO: 1742 - RNA, 19 nt, synthetic construct
  source 1..19: mol_type = other RNA
ggaagtcctggctcgtgat

SEQ ID NO: 1743 - RNA, 19 nt, synthetic construct
  source 1..19: mol_type = other RNA
gaagtcctggctcgtgatt

SEQ ID NO: 1744 - RNA, 19 nt, synthetic construct
  source 1..19: mol_type = other RNA
aagtcctggctcgtgattt

SEQ ID NO: 1745 - RNA, 19 nt, synthetic construct
  source 1..19: mol_type = other RNA
agtcctggctcgtgatttt

SEQ ID NO: 1746 - RNA, 19 nt, synthetic construct
  source 1..19: mol_type = other RNA
gtcctggctcgtgattttg

SEQ ID NO: 1747 - RNA, 19 nt, synthetic construct
  source 1..19: mol_type = other RNA
tcctggctcgtgattttga

SEQ ID NO: 1748 - RNA, 19 nt, synthetic construct
  source 1..19: mol_type = other RNA
cctggctcgtgattttgac

SEQ ID NO: 1749 - RNA, 19 nt, synthetic construct
  source 1..19: mol_type = other RNA
ctggctcgtgattttgacc

SEQ ID NO: 1750 - RNA, 19 nt, synthetic construct
  source 1..19: mol_type = other RNA
tggctcgtgattttgacct

SEQ ID NO: 1751 - RNA, 19 nt, synthetic construct
  source 1..19: mol_type = other RNA
ggctcgtgattttgacctg

SEQ ID NO: 1752 - RNA, 19 nt, synthetic construct
  source 1..19: mol_type = other RNA
gctcgtgattttgacctgg

SEQ ID NO: 1753 - RNA, 19 nt, synthetic construct
  source 1..19: mol_type = other RNA
ctcgtgattttgacctggg

SEQ ID NO: 1754 - RNA, 19 nt, synthetic construct
  source 1..19: mol_type = other RNA
tcgtgattttgacctgggg

SEQ ID NO: 1755 - RNA, 19 nt, synthetic construct
  source 1..19: mol_type = other RNA
cgtgattttgacctggggt

SEQ ID NO: 1756 - RNA, 19 nt, synthetic construct
  source 1..19: mol_type = other RNA
gtgattttgacctggggtt

SEQ ID NO: 1757 - RNA, 19 nt, synthetic construct
  source 1..19: mol_type = other RNA
tgattttgacctggggttc

SEQ ID NO: 1758 - RNA, 19 nt, synthetic construct
  source 1..19: mol_type = other RNA
gattttgacctggggttct

SEQ ID NO: 1759 - RNA, 19 nt, synthetic construct
  source 1..19: mol_type = other RNA
attttgacctggggttctc

SEQ ID NO: 1760 - RNA, 19 nt, synthetic construct
  source 1..19: mol_type = other RNA
ttttgacctggggttctca

SEQ ID NO: 1761 - RNA, 19 nt, synthetic construct
  source 1..19: mol_type = other RNA
tttgacctggggttctcag

SEQ ID NO: 1762 - RNA, 19 nt, synthetic construct
  source 1..19: mol_type = other RNA
ttgacctggggttctcagg

SEQ ID NO: 1763 - RNA, 19 nt, synthetic construct
  source 1..19: mol_type = other RNA
tgacctggggttctcagga

SEQ ID NO: 1764 - RNA, 19 nt, synthetic construct
  source 1..19: mol_type = other RNA
gacctggggttctcaggaa

SEQ ID NO: 1765 - RNA, 19 nt, synthetic construct
  source 1..19: mol_type = other RNA
acctggggttctcaggaaa

SEQ ID NO: 1766 - RNA, 19 nt, synthetic construct
  source 1..19: mol_type = other RNA
cctggggttctcaggaaat

SEQ ID NO: 1767 - RNA, 19 nt, synthetic construct
  source 1..19: mol_type = other RNA
ctggggttctcaggaaatt

SEQ ID NO: 1768 - RNA, 19 nt, synthetic construct
  source 1..19: mol_type = other RNA
tggggttctcaggaaattc

SEQ ID NO: 1769 - RNA, 19 nt, synthetic construct
  source 1..19: mol_type = other RNA
ggggttctcaggaaattca

SEQ ID NO: 1770 - RNA, 19 nt, synthetic construct
  source 1..19: mol_type = other RNA
gggttctcaggaaattcag

SEQ ID NO: 1771 - RNA, 19 nt, synthetic construct
  source 1..19: mol_type = other RNA
ggttctcaggaaattcaga

SEQ ID NO: 1772 - RNA, 19 nt, synthetic construct
  source 1..19: mol_type = other RNA
gttctcaggaaattcagaa

SEQ ID NO: 1773 - RNA, 19 nt, synthetic construct
  source 1..19: mol_type = other RNA
ttctcaggaaattcagaag

SEQ ID NO: 1774 - RNA, 19 nt, synthetic construct
  source 1..19: mol_type = other RNA
tctcaggaaattcagaaga

SEQ ID NO: 1775 - RNA, 19 nt, synthetic construct
  source 1..19: mol_type = other RNA
ctcaggaaattcagaagat

SEQ ID NO: 1776 - RNA, 19 nt, synthetic construct
  source 1..19: mol_type = other RNA
tcaggaaattcagaagatg

SEQ ID NO: 1777 - RNA, 19 nt, synthetic construct
  source 1..19: mol_type = other RNA
caggaaattcagaagatgt

SEQ ID NO: 1778 - RNA, 19 nt, synthetic construct
  source 1..19: mol_type = other RNA
aggaaattcagaagatgta

SEQ ID NO: 1779 - RNA, 19 nt, synthetic construct
  source 1..19: mol_type = other RNA
ggaaattcagaagatgtag

SEQ ID NO: 1780 - RNA, 19 nt, synthetic construct
  source 1..19: mol_type = other RNA
gaaattcagaagatgtagt

SEQ ID NO: 1781 - RNA, 19 nt, synthetic construct
  source 1..19: mol_type = other RNA
aaattcagaagatgtagta

SEQ ID NO: 1782 - RNA, 19 nt, synthetic construct
  source 1..19: mol_type = other RNA
aattcagaagatgtagtaa

SEQ ID NO: 1783 - RNA, 19 nt, synthetic construct
  source 1..19: mol_type = other RNA
attcagaagatgtagtaat

SEQ ID NO: 1784 - RNA, 19 nt, synthetic construct
  source 1..19: mol_type = other RNA
ttcagaagatgtagtaatg

SEQ ID NO: 1785 - RNA, 19 nt, synthetic construct
  source 1..19: mol_type = other RNA
tcagaagatgtagtaatgc

SEQ ID NO: 1786 - RNA, 19 nt, synthetic construct
  source 1..19: mol_type = other RNA
cagaagatgtagtaatgca

SEQ ID NO: 1787 - RNA, 19 nt, synthetic construct
  source 1..19: mol_type = other RNA
agaagatgtagtaatgcat

SEQ ID NO: 1788 - RNA, 19 nt, synthetic construct
  source 1..19: mol_type = other RNA
gaagatgtagtaatgcatg

SEQ ID NO: 1789 - RNA, 19 nt, synthetic construct
  source 1..19: mol_type = other RNA
aagatgtagtaatgcatgc

SEQ ID NO: 1790 - RNA, 19 nt, synthetic construct
  source 1..19: mol_type = other RNA
agatgtagtaatgcatgcc

SEQ ID NO: 1791 - RNA, 19 nt, synthetic construct
  source 1..19: mol_type = other RNA
gatgtagtaatgcatgcca

SEQ ID NO: 1792 - RNA, 19 nt, synthetic construct
  source 1..19: mol_type = other RNA
atgtagtaatgcatgccat

SEQ ID NO: 1793 - RNA, 19 nt, synthetic construct
  source 1..19: mol_type = other RNA
tgtagtaatgcatgccata

SEQ ID NO: 1794 - RNA, 19 nt, synthetic construct
  source 1..19: mol_type = other RNA
gtagtaatgcatgccatac

SEQ ID NO: 1795 - RNA, 19 nt, synthetic construct
  source 1..19: mol_type = other RNA
tagtaatgcatgccataca

SEQ ID NO: 1796 - RNA, 19 nt, synthetic construct
  source 1..19: mol_type = other RNA
agtaatgcatgccatacag

SEQ ID NO: 1797 - RNA, 19 nt, synthetic construct
  source 1..19: mol_type = other RNA
gtaatgcatgccatacagc

SEQ ID NO: 1798 - RNA, 19 nt, synthetic construct
  source 1..19: mol_type = other RNA
taatgcatgccatacagct

SEQ ID NO: 1799 - RNA, 19 nt, synthetic construct
  source 1..19: mol_type = other RNA
aatgcatgccatacagctg

SEQ ID NO: 1800 - RNA, 19 nt, synthetic construct
  source 1..19: mol_type = other RNA
atgcatgccatacagctgc

SEQ ID NO: 1801 - RNA, 19 nt, synthetic construct
  source 1..19: mol_type = other RNA
tgcatgccatacagctgct

SEQ ID NO: 1802 - RNA, 19 nt, synthetic construct
  source 1..19: mol_type = other RNA
gcatgccatacagctgctg

SEQ ID NO: 1803 - RNA, 19 nt, synthetic construct
  source 1..19: mol_type = other RNA
catgccatacagctgctgg

SEQ ID NO: 1804 - RNA, 19 nt, synthetic construct
  source 1..19: mol_type = other RNA
atgccatacagctgctggg

SEQ ID NO: 1805 - RNA, 19 nt, synthetic construct
  source 1..19: mol_type = other RNA
tgccatacagctgctggga

SEQ ID NO: 1806 - RNA, 19 nt, synthetic construct
  source 1..19: mol_type = other RNA
gccatacagctgctgggaa

SEQ ID NO: 1807 - RNA, 19 nt, synthetic construct
  source 1..19: mol_type = other RNA
ccatacagctgctgggaaa

SEQ ID NO: 1808 - RNA, 19 nt, synthetic construct
  source 1..19: mol_type = other RNA
catacagctgctgggaaat

SEQ ID NO: 1809 - RNA, 19 nt, synthetic construct
  source 1..19: mol_type = other RNA
atacagctgctgggaaatt

SEQ ID NO: 1810 - RNA, 19 nt, synthetic construct
  source 1..19: mol_type = other RNA
tacagctgctgggaaattg

SEQ ID NO: 1811 - RNA, 19 nt, synthetic construct
  source 1..19: mol_type = other RNA
acagctgctgggaaattgt

SEQ ID NO: 1812 - RNA, 19 nt, synthetic construct
  source 1..19: mol_type = other RNA
cagctgctgggaaattgtg

SEQ ID NO: 1813 - RNA, 19 nt, synthetic construct
  source 1..19: mol_type = other RNA
agctgctgggaaattgtgt

SEQ ID NO: 1814 - RNA, 19 nt, synthetic construct
  source 1..19: mol_type = other RNA
gctgctgggaaattgtgtc

SEQ ID NO: 1815 - RNA, 19 nt, synthetic construct
  source 1..19: mol_type = other RNA
ctgctgggaaattgtgtca

SEQ ID NO: 1816 - RNA, 19 nt, synthetic construct
  source 1..19: mol_type = other RNA
tgctgggaaattgtgtcac

SEQ ID NO: 1817 - RNA, 19 nt, synthetic construct
  source 1..19: mol_type = other RNA
gctgggaaattgtgtcaca

SEQ ID NO: 1818 - RNA, 19 nt, synthetic construct
  source 1..19: mol_type = other RNA
ctgggaaattgtgtcacaa

SEQ ID NO: 1819 - RNA, 19 nt, synthetic construct
  source 1..19: mol_type = other RNA
tgggaaattgtgtcacaat

SEQ ID NO: 1820 - RNA, 19 nt, synthetic construct
  source 1..19: mol_type = other RNA
gggaaattgtgtcacaatc

SEQ ID NO: 1821 - RNA, 19 nt, synthetic construct
  source 1..19: mol_type = other RNA
ggaaattgtgtcacaatca

SEQ ID NO: 1822 - RNA, 19 nt, synthetic construct
  source 1..19: mol_type = other RNA
gaaattgtgtcacaatcac

SEQ ID NO: 1823 - RNA, 19 nt, synthetic construct
  source 1..19: mol_type = other RNA
aaattgtgtcacaatcacc

SEQ ID NO: 1824 - RNA, 19 nt, synthetic construct
  source 1..19: mol_type = other RNA
aattgtgtcacaatcaccc

SEQ ID NO: 1825 - RNA, 19 nt, synthetic construct
  source 1..19: mol_type = other RNA
attgtgtcacaatcaccca

SEQ ID NO: 1826 - RNA, 19 nt, synthetic construct
  source 1..19: mol_type = other RNA
ttgtgtcacaatcacccac

SEQ ID NO: 1827 - RNA, 19 nt, synthetic construct
  source 1..19: mol_type = other RNA
tgtgtcacaatcacccaca

SEQ ID NO: 1828 - RNA, 19 nt, synthetic construct
  source 1..19: mol_type = other RNA
gtgtcacaatcacccacac

SEQ ID NO: 1829 - RNA, 19 nt, synthetic construct
  source 1..19: mol_type = other RNA
tgtcacaatcacccacact

SEQ ID NO: 1830 - RNA, 19 nt, synthetic construct
  source 1..19: mol_type = other RNA
gtcacaatcacccacacta

SEQ ID NO: 1831 - RNA, 19 nt, synthetic construct
  source 1..19: mol_type = other RNA
tcacaatcacccacactag

SEQ ID NO: 1832 - RNA, 19 nt, synthetic construct
  source 1..19: mol_type = other RNA
cacaatcacccacactagc

SEQ ID NO: 1833 - RNA, 19 nt, synthetic construct
  source 1..19: mol_type = other RNA
acaatcacccacactagca

SEQ ID NO: 1834 - RNA, 19 nt, synthetic construct
  source 1..19: mol_type = other RNA
caatcacccacactagcag

SEQ ID NO: 1835 - RNA, 19 nt, synthetic construct
  source 1..19: mol_type = other RNA
aatcacccacactagcagg

SEQ ID NO: 1836 - RNA, 19 nt, synthetic construct
  source 1..19: mol_type = other RNA
atcacccacactagcagga

SEQ ID NO: 1837 - RNA, 19 nt, synthetic construct
  source 1..19: mol_type = other RNA
tcacccacactagcaggaa

SEQ ID NO: 1838 - RNA, 19 nt, synthetic construct
  source 1..19: mol_type = other RNA
cacccacactagcaggaac

SEQ ID NO: 1839 - RNA, 19 nt, synthetic construct
  source 1..19: mol_type = other RNA
acccacactagcaggaacg

SEQ ID NO: 1840 - RNA, 19 nt, synthetic construct
  source 1..19: mol_type = other RNA
cccacactagcaggaacga

SEQ ID NO: 1841 - RNA, 19 nt, synthetic construct
  source 1..19: mol_type = other RNA
ccacactagcaggaacgat

SEQ ID NO: 1842 - RNA, 19 nt, synthetic construct
  source 1..19: mol_type = other RNA
cacactagcaggaacgatg

SEQ ID NO: 1843 - RNA, 19 nt, synthetic construct
  source 1..19: mol_type = other RNA
acactagcaggaacgatga

SEQ ID NO: 1844 - RNA, 19 nt, synthetic construct
  source 1..19: mol_type = other RNA
cactagcaggaacgatgag

SEQ ID NO: 1845 - RNA, 19 nt, synthetic construct
  source 1..19: mol_type = other RNA
actagcaggaacgatgagt

SEQ ID NO: 1846 - RNA, 19 nt, synthetic construct
  source 1..19: mol_type = other RNA
ctagcaggaacgatgagtt

SEQ ID NO: 1847 - RNA, 19 nt, synthetic construct
  source 1..19: mol_type = other RNA
tagcaggaacgatgagttt

SEQ ID NO: 1848 - RNA, 19 nt, synthetic construct
  source 1..19: mol_type = other RNA
agcaggaacgatgagtttt

SEQ ID NO: 1849 - RNA, 19 nt, synthetic construct
  source 1..19: mol_type = other RNA
gcaggaacgatgagttttt

SEQ ID NO: 1850 - RNA, 19 nt, synthetic construct
  source 1..19: mol_type = other RNA
caggaacgatgagtttttt

SEQ ID NO: 1851 - RNA, 19 nt, synthetic construct
  source 1..19: mol_type = other RNA
aggaacgatgagtttttta

SEQ ID NO: 1852 - RNA, 19 nt, synthetic construct
  source 1..19: mol_type = other RNA
ggaacgatgagttttttat

SEQ ID NO: 1853 - RNA, 19 nt, synthetic construct
  source 1..19: mol_type = other RNA
gaacgatgagttttttatc

SEQ ID NO: 1854 - RNA, 19 nt, synthetic construct
  source 1..19: mol_type = other RNA
aacgatgagttttttatca

SEQ ID NO: 1855 - RNA, 19 nt, synthetic construct
  source 1..19: mol_type = other RNA
acgatgagttttttatcac

SEQ ID NO: 1856 - RNA, 19 nt, synthetic construct
  source 1..19: mol_type = other RNA
cgatgagttttttatcacc

SEQ ID NO: 1857 - RNA, 19 nt, synthetic construct
  source 1..19: mol_type = other RNA
gatgagttttttatcaccc

SEQ ID NO: 1858 - RNA, 19 nt, synthetic construct
  source 1..19: mol_type = other RNA
atgagttttttatcacccc

SEQ ID NO: 1859 - RNA, 19 nt, synthetic construct
  source 1..19: mol_type = other RNA
tgagttttttatcaccccc

SEQ ID NO: 1860 - RNA, 19 nt, synthetic construct
  source 1..19: mol_type = other RNA
gagttttttatcaccccca

SEQ ID NO: 1861 - RNA, 19 nt, synthetic construct
  source 1..19: mol_type = other RNA
agttttttatcacccccag

SEQ ID NO: 1862 - RNA, 19 nt, synthetic construct
  source 1..19: mol_type = other RNA
gttttttatcacccccagc

SEQ ID NO: 1863 - RNA, 19 nt, synthetic construct
  source 1..19: mol_type = other RNA
ttttttatcacccccagca

SEQ ID NO: 1864 - RNA, 19 nt, synthetic construct
  source 1..19: mol_type = other RNA
tttttatcacccccagcac

SEQ ID NO: 1865 - RNA, 19 nt, synthetic construct
  source 1..19: mol_type = other RNA
ttttatcacccccagcaca

SEQ ID NO: 1866 - RNA, 19 nt, synthetic construct
  source 1..19: mol_type = other RNA
tttatcacccccagcacaa

SEQ ID NO: 1867 - RNA, 19 nt, synthetic construct
  source 1..19: mol_type = other RNA
ttatcacccccagcacaac

SEQ ID NO: 1868 - RNA, 19 nt, synthetic construct
  source 1..19: mol_type = other RNA
tatcacccccagcacaact

SEQ ID NO: 1869 - RNA, 19 nt, synthetic construct
  source 1..19: mol_type = other RNA
atcacccccagcacaactg

SEQ ID NO: 1870 - RNA, 19 nt, synthetic construct
  source 1..19: mol_type = other RNA
tcacccccagcacaactgt

SEQ ID NO: 1871 - RNA, 19 nt, synthetic construct
  source 1..19: mol_type = other RNA
cacccccagcacaactgtc

SEQ ID NO: 1872 - RNA, 19 nt, synthetic construct
  source 1..19: mol_type = other RNA
acccccagcacaactgtcc

SEQ ID NO: 1873 - RNA, 19 nt, synthetic construct
  source 1..19: mol_type = other RNA
cccccagcacaactgtccc

SEQ ID NO: 1874 - RNA, 19 nt, synthetic construct
  source 1..19: mol_type = other RNA
ccccagcacaactgtccca

SEQ ID NO: 1875 - RNA, 19 nt, synthetic construct
  source 1..19: mol_type = other RNA
cccagcacaactgtcccat

SEQ ID NO: 1876 - RNA, 19 nt, synthetic construct
  source 1..19: mol_type = other RNA
ccagcacaactgtcccatc

SEQ ID NO: 1877 - RNA, 19 nt, synthetic construct
  source 1..19: mol_type = other RNA
cagcacaactgtcccatca

SEQ ID NO: 1878 - RNA, 19 nt, synthetic construct
  source 1..19: mol_type = other RNA
agcacaactgtcccatcag

SEQ ID NO: 1879 - RNA, 19 nt, synthetic construct
  source 1..19: mol_type = other RNA
gcacaactgtcccatcagt

SEQ ID NO: 1880 - RNA, 19 nt, synthetic construct
  source 1..19: mol_type = other RNA
cacaactgtcccatcagtc

SEQ ID NO: 1881 - RNA, 19 nt, synthetic construct
  source 1..19: mol_type = other RNA
acaactgtcccatcagtct

SEQ ID NO: 1882 - RNA, 19 nt, synthetic construct
  source 1..19: mol_type = other RNA
caactgtcccatcagtctt

SEQ ID NO: 1883 - RNA, 19 nt, synthetic construct
  source 1..19: mol_type = other RNA
aactgtcccatcagtcttc

SEQ ID NO: 1884 - RNA, 19 nt, synthetic construct
  source 1..19: mol_type = other RNA
actgtcccatcagtcttcg

SEQ ID NO: 1885 - RNA, 19 nt, synthetic construct
  source 1..19: mol_type = other RNA
ctgtcccatcagtcttcga

SEQ ID NO: 1886 - RNA, 19 nt, synthetic construct
  source 1..19: mol_type = other RNA
tgtcccatcagtcttcgaa

SEQ ID NO: 1887 - RNA, 19 nt, synthetic construct
  source 1..19: mol_type = other RNA
gtcccatcagtcttcgaac

SEQ ID NO: 1888 - RNA, 19 nt, synthetic construct
  source 1..19: mol_type = other RNA
tcccatcagtcttcgaact

SEQ ID NO: 1889 - RNA, 19 nt, synthetic construct
  source 1..19: mol_type = other RNA
cccatcagtcttcgaactc

SEQ ID NO: 1890 - RNA, 19 nt, synthetic construct
  source 1..19: mol_type = other RNA
ccatcagtcttcgaactca

SEQ ID NO: 1891 - RNA, 19 nt, synthetic construct
  source 1..19: mol_type = other RNA
catcagtcttcgaactcaa

SEQ ID NO: 1892 - RNA, 19 nt, synthetic construct
  source 1..19: mol_type = other RNA
atcagtcttcgaactcaac

SEQ ID NO: 1893 - RNA, 19 nt, synthetic construct
  source 1..19: mol_type = other RNA
tcagtcttcgaactcaact

SEQ ID NO: 1894 - RNA, 19 nt, synthetic construct
  source 1..19: mol_type = other RNA
cagtcttcgaactcaactt

SEQ ID NO: 1895 - RNA, 19 nt, synthetic construct
  source 1..19: mol_type = other RNA
agtcttcgaactcaacttc

SEQ ID NO: 1896 - RNA, 19 nt, synthetic construct
  source 1..19: mol_type = other RNA
gtcttcgaactcaacttct

SEQ ID NO: 1897 - RNA, 19 nt, synthetic construct
  source 1..19: mol_type = other RNA
tcttcgaactcaacttcta

SEQ ID NO: 1898 - RNA, 19 nt, synthetic construct
  source 1..19: mol_type = other RNA
cttcgaactcaacttctac

SEQ ID NO: 1899 - RNA, 19 nt, synthetic construct
  source 1..19: mol_type = other RNA
ttcgaactcaacttctaca

SEQ ID NO: 1900 - RNA, 19 nt, synthetic construct
  source 1..19: mol_type = other RNA
tcgaactcaacttctacag

SEQ ID NO: 1901 - RNA, 19 nt, synthetic construct
  source 1..19: mol_type = other RNA
cgaactcaacttctacagc

SEQ ID NO: 1902 - RNA, 19 nt, synthetic construct
  source 1..19: mol_type = other RNA
gaactcaacttctacagca

SEQ ID NO: 1903 - RNA, 19 nt, synthetic construct
  source 1..19: mol_type = other RNA
aactcaacttctacagcaa

SEQ ID NO: 1904 - RNA, 19 nt, synthetic construct
  source 1..19: mol_type = other RNA
actcaacttctacagcaat

SEQ ID NO: 1905 - RNA, 19 nt, synthetic construct
  source 1..19: mol_type = other RNA
ctcaacttctacagcaatg

SEQ ID NO: 1906 - RNA, 19 nt, synthetic construct
  source 1..19: mol_type = other RNA
tcaacttctacagcaatgg

SEQ ID NO: 1907 - RNA, 19 nt, synthetic construct
  source 1..19: mol_type = other RNA
caacttctacagcaatggg

SEQ ID NO: 1908 - RNA, 19 nt, synthetic construct
  source 1..19: mol_type = other RNA
aacttctacagcaatgggg

SEQ ID NO: 1909 - RNA, 19 nt, synthetic construct
  source 1..19: mol_type = other RNA
acttctacagcaatggggt

SEQ ID NO: 1910 - RNA, 19 nt, synthetic construct
  source 1..19: mol_type = other RNA
cttctacagcaatggggta

SEQ ID NO: 1911 - RNA, 19 nt, synthetic construct
  source 1..19: mol_type = other RNA
ttctacagcaatggggtac

SEQ ID NO: 1912 - RNA, 19 nt, synthetic construct
  source 1..19: mol_type = other RNA
tctacagcaatggggtact

SEQ ID NO: 1913 - RNA, 19 nt, synthetic construct
  source 1..19: mol_type = other RNA
ctacagcaatggggtactt

SEQ ID NO: 1914 - RNA, 19 nt, synthetic construct
  source 1..19: mol_type = other RNA
tacagcaatggggtacttc

SEQ ID NO: 1915 - RNA, 19 nt, synthetic construct
  source 1..19: mol_type = other RNA
acagcaatggggtacttca

SEQ ID NO: 1916 - RNA, 19 nt, synthetic construct
  source 1..19: mol_type = other RNA
cagcaatggggtacttcat

SEQ ID NO: 1917 - RNA, 19 nt, synthetic construct
  source 1..19: mol_type = other RNA
agcaatggggtacttcatg

SEQ ID NO: 1918 - RNA, 19 nt, synthetic construct
  source 1..19: mol_type = other RNA
gcaatggggtacttcatgt

SEQ ID NO: 1919 - RNA, 19 nt, synthetic construct
  source 1..19: mol_type = other RNA
caatggggtacttcatgtc

SEQ ID NO: 1920 - RNA, 19 nt, synthetic construct
  source 1..19: mol_type = other RNA
aatggggtacttcatgtct

SEQ ID NO: 1921 - RNA, 19 nt, synthetic construct
  source 1..19: mol_type = other RNA
atggggtacttcatgtctt

SEQ ID NO: 1922 - RNA, 19 nt, synthetic construct
  source 1..19: mol_type = other RNA
tggggtacttcatgtcttt

SEQ ID NO: 1923 - RNA, 19 nt, synthetic construct
  source 1..19: mol_type = other RNA
ggggtacttcatgtcttta

SEQ ID NO: 1924 - RNA, 19 nt, synthetic construct
  source 1..19: mol_type = other RNA
gggtacttcatgtctttat

SEQ ID NO: 1925 - RNA, 19 nt, synthetic construct
  source 1..19: mol_type = other RNA
ggtacttcatgtctttatc

SEQ ID NO: 1926 - RNA, 19 nt, synthetic construct
  source 1..19: mol_type = other RNA
gtacttcatgtctttatca

SEQ ID NO: 1927 - RNA, 19 nt, synthetic construct
  source 1..19: mol_type = other RNA
tacttcatgtctttatcat

SEQ ID NO: 1928 - RNA, 19 nt, synthetic construct
  source 1..19: mol_type = other RNA
acttcatgtctttatcatg

SEQ ID NO: 1929 - RNA, 19 nt, synthetic construct
  source 1..19: mol_type = other RNA
cttcatgtctttatcatgg

SEQ ID NO: 1930 - RNA, 19 nt, synthetic construct
  source 1..19: mol_type = other RNA
ttcatgtctttatcatgga

SEQ ID NO: 1931 - RNA, 19 nt, synthetic construct
  source 1..19: mol_type = other RNA
tcatgtctttatcatggag

SEQ ID NO: 1932 - RNA, 19 nt, synthetic construct
  source 1..19: mol_type = other RNA
catgtctttatcatggagg

SEQ ID NO: 1933 - RNA, 19 nt, synthetic construct
  source 1..19: mol_type = other RNA
atgtctttatcatggaggc

SEQ ID NO: 1934 - RNA, 19 nt, synthetic construct
  source 1..19: mol_type = other RNA
tgtctttatcatggaggcc

SEQ ID NO: 1935 - RNA, 19 nt, synthetic construct
  source 1..19: mol_type = other RNA
gtctttatcatggaggcca

SEQ ID NO: 1936 - RNA, 19 nt, synthetic construct
  source 1..19: mol_type = other RNA
tctttatcatggaggccat

SEQ ID NO: 1937 - RNA, 19 nt, synthetic construct
  source 1..19: mol_type = other RNA
ctttatcatggaggccatc

SEQ ID NO: 1938 - RNA, 19 nt, synthetic construct
  source 1..19: mol_type = other RNA
tttatcatggaggccatca

SEQ ID NO: 1939 - RNA, 19 nt, synthetic construct
  source 1..19: mol_type = other RNA
ttatcatggaggccatcat

SEQ ID NO: 1940 - RNA, 19 nt, synthetic construct
  source 1..19: mol_type = other RNA
tatcatggaggccatcata

SEQ ID NO: 1941 - RNA, 19 nt, synthetic construct
  source 1..19: mol_type = other RNA
atcatggaggccatcatag

SEQ ID NO: 1942 - RNA, 19 nt, synthetic construct
  source 1..19: mol_type = other RNA
tcatggaggccatcatagc

SEQ ID NO: 1943 - RNA, 19 nt, synthetic construct
  source 1..19: mol_type = other RNA
catggaggccatcatagct

SEQ ID NO: 1944 - RNA, 19 nt, synthetic construct
  source 1..19: mol_type = other RNA
atggaggccatcatagctt

SEQ ID NO: 1945 - RNA, 19 nt, synthetic construct
  source 1..19: mol_type = other RNA
tggaggccatcatagcttg

SEQ ID NO: 1946 - RNA, 19 nt, synthetic construct
  source 1..19: mol_type = other RNA
ggaggccatcatagcttgc

SEQ ID NO: 1947 - RNA, 19 nt, synthetic construct
  source 1..19: mol_type = other RNA
gaggccatcatagcttgca

SEQ ID NO: 1948 - RNA, 19 nt, synthetic construct
  source 1..19: mol_type = other RNA
aggccatcatagcttgcag

SEQ ID NO: 1949 - RNA, 19 nt, synthetic construct
  source 1..19: mol_type = other RNA
ggccatcatagcttgcagc

SEQ ID NO: 1950 - RNA, 19 nt, synthetic construct
  source 1..19: mol_type = other RNA
gccatcatagcttgcagcc

SEQ ID NO: 1951 - RNA, 19 nt, synthetic construct
  source 1..19: mol_type = other RNA
ccatcatagcttgcagcct

SEQ ID NO: 1952 - RNA, 19 nt, synthetic construct
  source 1..19: mol_type = other RNA
catcatagcttgcagcctt

SEQ ID NO: 1953 - RNA, 19 nt, synthetic construct
  source 1..19: mol_type = other RNA
atcatagcttgcagccttt

SEQ ID NO: 1954 - RNA, 19 nt, synthetic construct
  source 1..19: mol_type = other RNA
tcatagcttgcagccttta

SEQ ID NO: 1955 - RNA, 19 nt, synthetic construct
  source 1..19: mol_type = other RNA
catagcttgcagcctttat

SEQ ID NO: 1956 - RNA, 19 nt, synthetic construct
  source 1..19: mol_type = other RNA
atagcttgcagcctttatg

SEQ ID NO: 1957 - RNA, 19 nt, synthetic construct
  source 1..19: mol_type = other RNA
tagcttgcagcctttatgc

SEQ ID NO: 1958 - RNA, 19 nt, synthetic construct
  source 1..19: mol_type = other RNA
agcttgcagcctttatgca

SEQ ID NO: 1959 - RNA, 19 nt, synthetic construct
  source 1..19: mol_type = other RNA
gcttgcagcctttatgcag

SEQ ID NO: 1960 - RNA, 19 nt, synthetic construct
  source 1..19: mol_type = other RNA
cttgcagcctttatgcagt

SEQ ID NO: 1961 - RNA, 19 nt, synthetic construct
  source 1..19: mol_type = other RNA
ttgcagcctttatgcagtt

SEQ ID NO: 1962 - RNA, 19 nt, synthetic construct
  source 1..19: mol_type = other RNA
tgcagcctttatgcagttc

SEQ ID NO: 1963 - RNA, 19 nt, synthetic construct
  source 1..19: mol_type = other RNA
gcagcctttatgcagttct

SEQ ID NO: 1964 - RNA, 19 nt, synthetic construct
  source 1..19: mol_type = other RNA
cagcctttatgcagttctg

SEQ ID NO: 1965 - RNA, 19 nt, synthetic construct
  source 1..19: mol_type = other RNA
agcctttatgcagttctga

SEQ ID NO: 1966 - RNA, 19 nt, synthetic construct
  source 1..19: mol_type = other RNA
gcctttatgcagttctgaa

SEQ ID NO: 1967 - RNA, 19 nt, synthetic construct
  source 1..19: mol_type = other RNA
cctttatgcagttctgaac

SEQ ID NO: 1968 - RNA, 19 nt, synthetic construct
  source 1..19: mol_type = other RNA
ctttatgcagttctgaaca

SEQ ID NO: 1969 - RNA, 19 nt, synthetic construct
  source 1..19: mol_type = other RNA
tttatgcagttctgaacaa

SEQ ID NO: 1970 - RNA, 19 nt, synthetic construct
  source 1..19: mol_type = other RNA
ttatgcagttctgaacaag

SEQ ID NO: 1971 - RNA, 19 nt, synthetic construct
  source 1..19: mol_type = other RNA
tatgcagttctgaacaaga

SEQ ID NO: 1972 - RNA, 19 nt, synthetic construct
  source 1..19: mol_type = other RNA
atgcagttctgaacaagag

SEQ ID NO: 1973 - RNA, 19 nt, synthetic construct
  source 1..19: mol_type = other RNA
tgcagttctgaacaagagg

SEQ ID NO: 1974 - RNA, 19 nt, synthetic construct
  source 1..19: mol_type = other RNA
gcagttctgaacaagaggg

SEQ ID NO: 1975 - RNA, 19 nt, synthetic construct
  source 1..19: mol_type = other RNA
cagttctgaacaagagggg

SEQ ID NO: 1976 - RNA, 19 nt, synthetic construct
  source 1..19: mol_type = other RNA
agttctgaacaagagggga

SEQ ID NO: 1977 - RNA, 19 nt, synthetic construct
  source 1..19: mol_type = other RNA
gttctgaacaagaggggac

SEQ ID NO: 1978 - RNA, 19 nt, synthetic construct
  source 1..19: mol_type = other RNA
ttctgaacaagaggggact

SEQ ID NO: 1979 - RNA, 19 nt, synthetic construct
  source 1..19: mol_type = other RNA
tctgaacaagaggggactg

SEQ ID NO: 1980 - RNA, 19 nt, synthetic construct
  source 1..19: mol_type = other RNA
ctgaacaagaggggactgg

SEQ ID NO: 1981 - RNA, 19 nt, synthetic construct
  source 1..19: mol_type = other RNA
tgaacaagaggggactggg

SEQ ID NO: 1982 - RNA, 19 nt, synthetic construct
  source 1..19: mol_type = other RNA
gaacaagaggggactgggg

SEQ ID NO: 1983 - RNA, 19 nt, synthetic construct
  source 1..19: mol_type = other RNA
aacaagaggggactggggg

SEQ ID NO: 1984 - RNA, 19 nt, synthetic construct
  source 1..19: mol_type = other RNA
acaagaggggactgggggg

SEQ ID NO: 1985 - RNA, 19 nt, synthetic construct
  source 1..19: mol_type = other RNA
caagaggggactggggggt

SEQ ID NO: 1986 - RNA, 19 nt, synthetic construct
  source 1..19: mol_type = other RNA
aagaggggactggggggtc

SEQ ID NO: 1987 - RNA, 19 nt, synthetic construct
  source 1..19: mol_type = other RNA
agaggggactggggggtcc

SEQ ID NO: 1988 - RNA, 19 nt, synthetic construct
  source 1..19: mol_type = other RNA
gaggggactggggggtccc

SEQ ID NO: 1989 - RNA, 19 nt, synthetic construct
  source 1..19: mol_type = other RNA
aggggactggggggtccca

SEQ ID NO: 1990 - RNA, 19 nt, synthetic construct
  source 1..19: mol_type = other RNA
ggggactggggggtcccac

SEQ ID NO: 1991 - RNA, 19 nt, synthetic construct
  source 1..19: mol_type = other RNA
gggactggggggtcccact

SEQ ID NO: 1992 - RNA, 19 nt, synthetic construct
  source 1..19: mol_type = other RNA
ggactggggggtcccacta

SEQ ID NO: 1993 - RNA, 19 nt, synthetic construct
  source 1..19: mol_type = other RNA
gactggggggtcccactag

SEQ ID NO: 1994 - RNA, 19 nt, synthetic construct
  source 1..19: mol_type = other RNA
actggggggtcccactagc

SEQ ID NO: 1995 - RNA, 19 nt, synthetic construct
  source 1..19: mol_type = other RNA
ctggggggtcccactagca

SEQ ID NO: 1996 - RNA, 19 nt, synthetic construct
  source 1..19: mol_type = other RNA
tggggggtcccactagcac

SEQ ID NO: 1997 - RNA, 19 nt, synthetic construct
  source 1..19: mol_type = other RNA
ggggggtcccactagcacc

SEQ ID NO: 1998 - RNA, 19 nt, synthetic construct
  source 1..19: mol_type = other RNA
gggggtcccactagcaccc

SEQ ID NO: 1999 - RNA, 19 nt, synthetic construct
  source 1..19: mol_type = other RNA
ggggtcccactagcacccc

SEQ ID NO: 2000 - RNA, 19 nt, synthetic construct
  source 1..19: mol_type = other RNA
gggtcccactagcacccca

SEQ ID NO: 2001 - RNA, 19 nt, synthetic construct
  source 1..19: mol_type = other RNA
ggtcccactagcaccccac

SEQ ID NO: 2002 - RNA, 19 nt, synthetic construct
  source 1..19: mol_type = other RNA
gtcccactagcaccccacc

SEQ ID NO: 2003 - RNA, 19 nt, synthetic construct
  source 1..19: mol_type = other RNA
tcccactagcaccccacct

SEQ ID NO: 2004 - RNA, 19 nt, synthetic construct
  source 1..19: mol_type = other RNA
cccactagcaccccaccta

SEQ ID NO: 2005 - RNA, 19 nt, synthetic construct
  source 1..19: mol_type = other RNA
ccactagcaccccacctaa

SEQ ID NO: 2006 - RNA, 19 nt, synthetic construct
  source 1..19: mol_type = other RNA
cactagcaccccacctaac

SEQ ID NO: 2007 - RNA, 19 nt, synthetic construct
  source 1..19: mol_type = other RNA
actagcaccccacctaacc

SEQ ID NO: 2008 - RNA, 19 nt, synthetic construct
  source 1..19: mol_type = other RNA
ctagcaccccacctaacct

SEQ ID NO: 2009 - RNA, 19 nt, synthetic construct
  source 1..19: mol_type = other RNA
tagcaccccacctaacctg

SEQ ID NO: 2010 - RNA, 19 nt, synthetic construct
  source 1..19: mol_type = other RNA
agcaccccacctaacctga

SEQ ID NO: 2011 - RNA, 19 nt, synthetic construct
  source 1..19: mol_type = other RNA
gcaccccacctaacctgat

SEQ ID NO: 2012 - RNA, 19 nt, synthetic construct
  source 1..19: mol_type = other RNA
caccccacctaacctgatc

SEQ ID NO: 2013 - RNA, 19 nt, synthetic construct
  source 1..19: mol_type = other RNA
accccacctaacctgatca

SEQ ID NO: 2014 - RNA, 19 nt, synthetic construct
  source 1..19: mol_type = other RNA
ccccacctaacctgatcag

SEQ ID NO: 2015 - RNA, 19 nt, synthetic construct
  source 1..19: mol_type = other RNA
cccacctaacctgatcagc

SEQ ID NO: 2016 - RNA, 19 nt, synthetic construct
  source 1..19: mol_type = other RNA
ccacctaacctgatcagcc

SEQ ID NO: 2017 - RNA, 19 nt, synthetic construct
  source 1..19: mol_type = other RNA
cacctaacctgatcagcca

SEQ ID NO: 2018 - RNA, 19 nt, synthetic construct
  source 1..19: mol_type = other RNA
acctaacctgatcagccag

SEQ ID NO: 2019 - RNA, 19 nt, synthetic construct
  source 1..19: mol_type = other RNA
cctaacctgatcagccagg

SEQ ID NO: 2020 - RNA, 19 nt, synthetic construct
  source 1..19: mol_type = other RNA
ctaacctgatcagccagga

SEQ ID NO: 2021 - RNA, 19 nt, synthetic construct
  source 1..19: mol_type = other RNA
taacctgatcagccaggag

SEQ ID NO: 2022 - RNA, 19 nt, synthetic construct
  source 1..19: mol_type = other RNA
aacctgatcagccaggagc

SEQ ID NO: 2023 - RNA, 19 nt, synthetic construct
  source 1..19: mol_type = other RNA
acctgatcagccaggagca

SEQ ID NO: 2024 - RNA, 19 nt, synthetic construct
  source 1..19: mol_type = other RNA
cctgatcagccaggagcag

SEQ ID NO: 2025 - RNA, 19 nt, synthetic construct
  source 1..19: mol_type = other RNA
ctgatcagccaggagcagc

SEQ ID NO: 2026 - RNA, 19 nt, synthetic construct
  source 1..19: mol_type = other RNA
tgatcagccaggagcagct

SEQ ID NO: 2027 - RNA, 19 nt, synthetic construct
  source 1..19: mol_type = other RNA
gatcagccaggagcagctg

SEQ ID NO: 2028 - RNA, 19 nt, synthetic construct
  source 1..19: mol_type = other RNA
atcagccaggagcagctgg

SEQ ID NO: 2029 - RNA, 19 nt, synthetic construct
  source 1..19: mol_type = other RNA
tcagccaggagcagctggt

SEQ ID NO: 2030 - RNA, 19 nt, synthetic construct
  source 1..19: mol_type = other RNA
cagccaggagcagctggtg

SEQ ID NO: 2031 - RNA, 19 nt, synthetic construct
  source 1..19: mol_type = other RNA
agccaggagcagctggtgc

SEQ ID NO: 2032 - RNA, 19 nt, synthetic construct
  source 1..19: mol_type = other RNA
gccaggagcagctggtgcg

SEQ ID NO: 2033 - RNA, 19 nt, synthetic construct
  source 1..19: mol_type = other RNA
ccaggagcagctggtgcgg

SEQ ID NO: 2034 - RNA, 19 nt, synthetic construct
  source 1..19: mol_type = other RNA
caggagcagctggtgcgga

SEQ ID NO: 2035 - RNA, 19 nt, synthetic construct
  source 1..19: mol_type = other RNA
aggagcagctggtgcggaa

SEQ ID NO: 2036 - RNA, 19 nt, synthetic construct
  source 1..19: mol_type = other RNA
ggagcagctggtgcggaag

SEQ ID NO: 2037 - RNA, 19 nt, synthetic construct
  source 1..19: mol_type = other RNA
gagcagctggtgcggaagg

SEQ ID NO: 2038 - RNA, 19 nt, synthetic construct
  source 1..19: mol_type = other RNA
agcagctggtgcggaaggc

SEQ ID NO: 2039 - RNA, 19 nt, synthetic construct
  source 1..19: mol_type = other RNA
gcagctggtgcggaaggcg

SEQ ID NO: 2040 - RNA, 19 nt, synthetic construct
  source 1..19: mol_type = other RNA
cagctggtgcggaaggcgg

SEQ ID NO: 2041 - RNA, 19 nt, synthetic construct
  source 1..19: mol_type = other RNA
agctggtgcggaaggcggc

SEQ ID NO: 2042 - RNA, 19 nt, synthetic construct
  source 1..19: mol_type = other RNA
gctggtgcggaaggcggcc

SEQ ID NO: 2043 - RNA, 19 nt, synthetic construct
  source 1..19: mol_type = other RNA
ctggtgcggaaggcggcca

SEQ ID NO: 2044 - RNA, 19 nt, synthetic construct
  source 1..19: mol_type = other RNA
tggtgcggaaggcggccag

SEQ ID NO: 2045 - RNA, 19 nt, synthetic construct
  source 1..19: mol_type = other RNA
ggtgcggaaggcggccagc

SEQ ID NO: 2046 - RNA, 19 nt, synthetic construct
  source 1..19: mol_type = other RNA
gtgcggaaggcggccagcc

SEQ ID NO: 2047 - RNA, 19 nt, synthetic construct
  source 1..19: mol_type = other RNA
tgcggaaggcggccagcct

SEQ ID NO: 2048 - RNA, 19 nt, synthetic construct
  source 1..19: mol_type = other RNA
gcggaaggcggccagcctg

SEQ ID NO: 2049 - RNA, 19 nt, synthetic construct
  source 1..19: mol_type = other RNA
cggaaggcggccagcctgt

SEQ ID NO: 2050 - RNA, 19 nt, synthetic construct
  source 1..19: mol_type = other RNA
ggaaggcggccagcctgtg

SEQ ID NO: 2051 - RNA, 19 nt, synthetic construct
  source 1..19: mol_type = other RNA
gaaggcggccagcctgtgc

SEQ ID NO: 2052 - RNA, 19 nt, synthetic construct
  source 1..19: mol_type = other RNA
aaggcggccagcctgtgct

SEQ ID NO: 2053 - RNA, 19 nt, synthetic construct
  source 1..19: mol_type = other RNA
aggcggccagcctgtgcta

SEQ ID NO: 2054 - RNA, 19 nt, synthetic construct
  source 1..19: mol_type = other RNA
ggcggccagcctgtgctac

SEQ ID NO: 2055 - RNA, 19 nt, synthetic construct
  source 1..19: mol_type = other RNA
gcggccagcctgtgctacc

SEQ ID NO: 2056 - RNA, 19 nt, synthetic construct
  source 1..19: mol_type = other RNA
cggccagcctgtgctacct

SEQ ID NO: 2057 - RNA, 19 nt, synthetic construct
  source 1..19: mol_type = other RNA
ggccagcctgtgctacctt

SEQ ID NO: 2058 - RNA, 19 nt, synthetic construct
  source 1..19: mol_type = other RNA
gccagcctgtgctaccttc

SEQ ID NO: 2059 - RNA, 19 nt, synthetic construct
  source 1..19: mol_type = other RNA
ccagcctgtgctaccttct

SEQ ID NO: 2060 - RNA, 19 nt, synthetic construct
  source 1..19: mol_type = other RNA
cagcctgtgctaccttctc

SEQ ID NO: 2061 - RNA, 19 nt, synthetic construct
  source 1..19: mol_type = other RNA
agcctgtgctaccttctct

SEQ ID NO: 2062 - RNA, 19 nt, synthetic construct
  source 1..19: mol_type = other RNA
gcctgtgctaccttctctc

SEQ ID NO: 2063 - RNA, 19 nt, synthetic construct
  source 1..19: mol_type = other RNA
cctgtgctaccttctctcc

SEQ ID NO: 2064 - RNA, 19 nt, synthetic construct
  source 1..19: mol_type = other RNA
ctgtgctaccttctctcca

SEQ ID NO: 2065 - RNA, 19 nt, synthetic construct
  source 1..19: mol_type = other RNA
tgtgctaccttctctccaa

SEQ ID NO: 2066 - RNA, 19 nt, synthetic construct
  source 1..19: mol_type = other RNA
gtgctaccttctctccaat

SEQ ID NO: 2067 - RNA, 19 nt, synthetic construct
  source 1..19: mol_type = other RNA
tgctaccttctctccaatg

SEQ ID NO: 2068 - RNA, 19 nt, synthetic construct
  source 1..19: mol_type = other RNA
gctaccttctctccaatga

SEQ ID NO: 2069 - RNA, 19 nt, synthetic construct
  source 1..19: mol_type = other RNA
ctaccttctctccaatgaa

SEQ ID NO: 2070 - RNA, 19 nt, synthetic construct
  source 1..19: mol_type = other RNA
taccttctctccaatgaag

SEQ ID NO: 2071 - RNA, 19 nt, synthetic construct
  source 1..19: mol_type = other RNA
accttctctccaatgaagg

SEQ ID NO: 2072 - RNA, 19 nt, synthetic construct
  source 1..19: mol_type = other RNA
ccttctctccaatgaaggc

SEQ ID NO: 2073 - RNA, 19 nt, synthetic construct
  source 1..19: mol_type = other RNA
cttctctccaatgaaggca

SEQ ID NO: 2074 - RNA, 19 nt, synthetic construct
  source 1..19: mol_type = other RNA
ttctctccaatgaaggcac

SEQ ID NO: 2075 - RNA, 19 nt, synthetic construct
  source 1..19: mol_type = other RNA
tctctccaatgaaggcacc

SEQ ID NO: 2076 - RNA, 19 nt, synthetic construct
  source 1..19: mol_type = other RNA
ctctccaatgaaggcacca

SEQ ID NO: 2077 - RNA, 19 nt, synthetic construct
  source 1..19: mol_type = other RNA
tctccaatgaaggcaccat

SEQ ID NO: 2078 - RNA, 19 nt, synthetic construct
  source 1..19: mol_type = other RNA
ctccaatgaaggcaccatc

SEQ ID NO: 2079 - RNA, 19 nt, synthetic construct
  source 1..19: mol_type = other RNA
tccaatgaaggcaccatct

SEQ ID NO: 2080 - RNA, 19 nt, synthetic construct
  source 1..19: mol_type = other RNA
ccaatgaaggcaccatctc

SEQ ID NO: 2081 - RNA, 19 nt, synthetic construct
  source 1..19: mol_type = other RNA
caatgaaggcaccatctca

SEQ ID NO: 2082 - RNA, 19 nt, synthetic construct
  source 1..19: mol_type = other RNA
aatgaaggcaccatctcac

SEQ ID NO: 2083 - RNA, 19 nt, synthetic construct
  source 1..19: mol_type = other RNA
atgaaggcaccatctcact

SEQ ID NO: 2084 - RNA, 19 nt, synthetic construct
  source 1..19: mol_type = other RNA
tgaaggcaccatctcactg

SEQ ID NO: 2085 - RNA, 19 nt, synthetic construct
  source 1..19: mol_type = other RNA
gaaggcaccatctcactgc

SEQ ID NO: 2086 - RNA, 19 nt, synthetic construct
  source 1..19: mol_type = other RNA
aaggcaccatctcactgcc

SEQ ID NO: 2087 - RNA, 19 nt, synthetic construct
  source 1..19: mol_type = other RNA
aggcaccatctcactgcct

SEQ ID NO: 2088 - RNA, 19 nt, synthetic construct
  source 1..19: mol_type = other RNA
ggcaccatctcactgcctt

SEQ ID NO: 2089 - RNA, 19 nt, synthetic construct
  source 1..19: mol_type = other RNA
gcaccatctcactgccttg

SEQ ID NO: 2090 - RNA, 19 nt, synthetic construct
  source 1..19: mol_type = other RNA
caccatctcactgccttgc

SEQ ID NO: 2091 - RNA, 19 nt, synthetic construct
  source 1..19: mol_type = other RNA
accatctcactgccttgcc

SEQ ID NO: 2092 - RNA, 19 nt, synthetic construct
  source 1..19: mol_type = other RNA
ccatctcactgccttgcca

SEQ ID NO: 2093 - RNA, 19 nt, synthetic construct
  source 1..19: mol_type = other RNA
catctcactgccttgccag

SEQ ID NO: 2094 - RNA, 19 nt, synthetic construct
  source 1..19: mol_type = other RNA
atctcactgccttgccaga

SEQ ID NO: 2095 - RNA, 19 nt, synthetic construct
  source 1..19: mol_type = other RNA
tctcactgccttgccagac

SEQ ID NO: 2096 - RNA, 19 nt, synthetic construct
  source 1..19: mol_type = other RNA
ctcactgccttgccagaca

SEQ ID NO: 2097 - RNA, 19 nt, synthetic construct
  source 1..19: mol_type = other RNA
tcactgccttgccagacat

SEQ ID NO: 2098 - RNA, 19 nt, synthetic construct
  source 1..19: mol_type = other RNA
cactgccttgccagacatt

SEQ ID NO: 2099 - RNA, 19 nt, synthetic construct
  source 1..19: mol_type = other RNA
actgccttgccagacattt

SEQ ID NO: 2100 - RNA, 19 nt, synthetic construct
  source 1..19: mol_type = other RNA
ctgccttgccagacatttt

SEQ ID NO: 2101 - RNA, 19 nt, synthetic construct
  source 1..19: mol_type = other RNA
tgccttgccagacatttta

SEQ ID NO: 2102 - RNA, 19 nt, synthetic construct
  source 1..19: mol_type = other RNA
gccttgccagacattttac

SEQ ID NO: 2103 - RNA, 19 nt, synthetic construct
  source 1..19: mol_type = other RNA
ccttgccagacattttacc

SEQ ID NO: 2104 - RNA, 19 nt, synthetic construct
  source 1..19: mol_type = other RNA
cttgccagacattttacca

SEQ ID NO: 2105 - RNA, 19 nt, synthetic construct
  source 1..19: mol_type = other RNA
ttgccagacattttaccaa

SEQ ID NO: 2106 - RNA, 19 nt, synthetic construct
  source 1..19: mol_type = other RNA
tgccagacattttaccaag

SEQ ID NO: 2107 - RNA, 19 nt, synthetic construct
  source 1..19: mol_type = other RNA
gccagacattttaccaagt

SEQ ID NO: 2108 - RNA, 19 nt, synthetic construct
  source 1..19: mol_type = other RNA
ccagacattttaccaagtc

SEQ ID NO: 2109 - RNA, 19 nt, synthetic construct
  source 1..19: mol_type = other RNA
cagacattttaccaagtct

SEQ ID NO: 2110 - RNA, 19 nt, synthetic construct
  source 1..19: mol_type = other RNA
agacattttaccaagtctg

SEQ ID NO: 2111 - RNA, 19 nt, synthetic construct
  source 1..19: mol_type = other RNA
gacattttaccaagtctgc

SEQ ID NO: 2112 - RNA, 19 nt, synthetic construct
  source 1..19: mol_type = other RNA
acattttaccaagtctgcc

SEQ ID NO: 2113 - RNA, 19 nt, synthetic construct
  source 1..19: mol_type = other RNA
cattttaccaagtctgcca

SEQ ID NO: 2114 - RNA, 19 nt, synthetic construct
  source 1..19: mol_type = other RNA
attttaccaagtctgccat

SEQ ID NO: 2115 - RNA, 19 nt, synthetic construct
  source 1..19: mol_type = other RNA
ttttaccaagtctgccatg

SEQ ID NO: 2116 - RNA, 19 nt, synthetic construct
  source 1..19: mol_type = other RNA
tttaccaagtctgccatga

SEQ ID NO: 2117 - RNA, 19 nt, synthetic construct
  source 1..19: mol_type = other RNA
ttaccaagtctgccatgaa

SEQ ID NO: 2118 - RNA, 19 nt, synthetic construct
  source 1..19: mol_type = other RNA
taccaagtctgccatgaaa

SEQ ID NO: 2119 - RNA, 19 nt, synthetic construct
  source 1..19: mol_type = other RNA
accaagtctgccatgaaac

SEQ ID NO: 2120 - RNA, 19 nt, synthetic construct
  source 1..19: mol_type = other RNA
ccaagtctgccatgaaaca

SEQ ID NO: 2121 - RNA, 19 nt, synthetic construct
  source 1..19: mol_type = other RNA
caagtctgccatgaaacag

SEQ ID NO: 2122 - RNA, 19 nt, synthetic construct
  source 1..19: mol_type = other RNA
aagtctgccatgaaacagt

SEQ ID NO: 2123 - RNA, 19 nt, synthetic construct
  source 1..19: mol_type = other RNA
agtctgccatgaaacagta

SEQ ID NO: 2124 - RNA, 19 nt, synthetic construct
  source 1..19: mol_type = other RNA
gtctgccatgaaacagtag

SEQ ID NO: 2125 - RNA, 19 nt, synthetic construct
  source 1..19: mol_type = other RNA
tctgccatgaaacagtagg

SEQ ID NO: 2126 - RNA, 19 nt, synthetic construct
  source 1..19: mol_type = other RNA
ctgccatgaaacagtagga

SEQ ID NO: 2127 - RNA, 19 nt, synthetic construct
  source 1..19: mol_type = other RNA
tgccatgaaacagtaggaa

SEQ ID NO: 2128 - RNA, 19 nt, synthetic construct
  source 1..19: mol_type = other RNA
gccatgaaacagtaggaaa

SEQ ID NO: 2129 - RNA, 19 nt, synthetic construct
  source 1..19: mol_type = other RNA
ccatgaaacagtaggaaag

SEQ ID NO: 2130 - RNA, 19 nt, synthetic construct
  source 1..19: mol_type = other RNA
catgaaacagtaggaaagt

SEQ ID NO: 2131 - RNA, 19 nt, synthetic construct
  source 1..19: mol_type = other RNA
atgaaacagtaggaaagtt

SEQ ID NO: 2132 - RNA, 19 nt, synthetic construct
  source 1..19: mol_type = other RNA
tgaaacagtaggaaagttt

SEQ ID NO: 2133 - RNA, 19 nt, synthetic construct
  source 1..19: mol_type = other RNA
gaaacagtaggaaagttta

SEQ ID NO: 2134 - RNA, 19 nt, synthetic construct
  source 1..19: mol_type = other RNA
aaacagtaggaaagtttat

SEQ ID NO: 2135 - RNA, 19 nt, synthetic construct
  source 1..19: mol_type = other RNA
aacagtaggaaagtttatc

SEQ ID NO: 2136 - RNA, 19 nt, synthetic construct
  source 1..19: mol_type = other RNA
acagtaggaaagtttatcc

SEQ ID NO: 2137 - RNA, 19 nt, synthetic construct
  source 1..19: mol_type = other RNA
cagtaggaaagtttatcca

SEQ ID NO: 2138 - RNA, 19 nt, synthetic construct
  source 1..19: mol_type = other RNA
agtaggaaagtttatccag

SEQ ID NO: 2139 - RNA, 19 nt, synthetic construct
  source 1..19: mol_type = other RNA
gtaggaaagtttatccagt

SEQ ID NO: 2140 - RNA, 19 nt, synthetic construct
  source 1..19: mol_type = other RNA
taggaaagtttatccagta

SEQ ID NO: 2141 - RNA, 19 nt, synthetic construct
  source 1..19: mol_type = other RNA
aggaaagtttatccagtat

SEQ ID NO: 2142 - RNA, 19 nt, synthetic construct
  source 1..19: mol_type = other RNA
ggaaagtttatccagtatg

SEQ ID NO: 2143 - RNA, 19 nt, synthetic construct
  source 1..19: mol_type = other RNA
gaaagtttatccagtatgg

SEQ ID NO: 2144 - RNA, 19 nt, synthetic construct
  source 1..19: mol_type = other RNA
aaagtttatccagtatggc

SEQ ID NO: 2145 - RNA, 19 nt, synthetic construct
  source 1..19: mol_type = other RNA
aagtttatccagtatggca

SEQ ID NO: 2146 - RNA, 19 nt, synthetic construct
  source 1..19: mol_type = other RNA
agtttatccagtatggcat

SEQ ID NO: 2147 - RNA, 19 nt, synthetic construct
  source 1..19: mol_type = other RNA
gtttatccagtatggcatt

SEQ ID NO: 2148 - RNA, 19 nt, synthetic construct
  source 1..19: mol_type = other RNA
tttatccagtatggcattc

SEQ ID NO: 2149 - RNA, 19 nt, synthetic construct
  source 1..19: mol_type = other RNA
ttatccagtatggcattct

SEQ ID NO: 2150 - RNA, 19 nt, synthetic construct
  source 1..19: mol_type = other RNA
tatccagtatggcattctt

SEQ ID NO: 2151 - RNA, 19 nt, synthetic construct
  source 1..19: mol_type = other RNA
atccagtatggcattctta

SEQ ID NO: 2152 - RNA, 19 nt, synthetic construct
  source 1..19: mol_type = other RNA
tccagtatggcattcttac

SEQ ID NO: 2153 - RNA, 19 nt, synthetic construct
  source 1..19: mol_type = other RNA
ccagtatggcattcttaca

SEQ ID NO: 2154 - RNA, 19 nt, synthetic construct
  source 1..19: mol_type = other RNA
cagtatggcattcttacag

SEQ ID NO: 2155 - RNA, 19 nt, synthetic construct
  source 1..19: mol_type = other RNA
agtatggcattcttacagt

SEQ ID NO: 2156 - RNA, 19 nt, synthetic construct
  source 1..19: mol_type = other RNA
gtatggcattcttacagtg

SEQ ID NO: 2157 - RNA, 19 nt, synthetic construct
  source 1..19: mol_type = other RNA
tatggcattcttacagtgg

SEQ ID NO: 2158 - RNA, 19 nt, synthetic construct
  source 1..19: mol_type = other RNA
atggcattcttacagtggc

SEQ ID NO: 2159 - RNA, 19 nt, synthetic construct
  source 1..19: mol_type = other RNA
tggcattcttacagtggca

SEQ ID NO: 2160 - RNA, 19 nt, synthetic construct
  source 1..19: mol_type = other RNA
ggcattcttacagtggcag

SEQ ID NO: 2161 - RNA, 19 nt, synthetic construct
  source 1..19: mol_type = other RNA
gcattcttacagtggcaga

SEQ ID NO: 2162 - RNA, 19 nt, synthetic construct
  source 1..19: mol_type = other RNA
cattcttacagtggcagag

SEQ ID NO: 2163 - RNA, 19 nt, synthetic construct
  source 1..19: mol_type = other RNA
attcttacagtggcagagc

SEQ ID NO: 2164 - RNA, 19 nt, synthetic construct
  source 1..19: mol_type = other RNA
ttcttacagtggcagagca

SEQ ID NO: 2165 - RNA, 19 nt, synthetic construct
  source 1..19: mol_type = other RNA
tcttacagtggcagagcac

SEQ ID NO: 2166 - RNA, 19 nt, synthetic construct
  source 1..19: mol_type = other RNA
cttacagtggcagagcacg

SEQ ID NO: 2167 - RNA, 19 nt, synthetic construct
  source 1..19: mol_type = other RNA
ttacagtggcagagcacga

SEQ ID NO: 2168 - RNA, 19 nt, synthetic construct
  source 1..19: mol_type = other RNA
tacagtggcagagcacgat

SEQ ID NO: 2169 - RNA, 19 nt, synthetic construct
  source 1..19: mol_type = other RNA
acagtggcagagcacgatg

SEQ ID NO: 2170 - RNA, 19 nt, synthetic construct
  source 1..19: mol_type = other RNA
cagtggcagagcacgatga

SEQ ID NO: 2171 - RNA, 19 nt, synthetic construct
  source 1..19: mol_type = other RNA
agtggcagagcacgatgac

SEQ ID NO: 2172 - RNA, 19 nt, synthetic construct
  source 1..19: mol_type = other RNA
gtggcagagcacgatgacc

SEQ ID NO: 2173 - RNA, 19 nt, synthetic construct
  source 1..19: mol_type = other RNA
tggcagagcacgatgacca

SEQ ID NO: 2174 - RNA, 19 nt, synthetic construct
  source 1..19: mol_type = other RNA
ggcagagcacgatgaccag

SEQ ID NO: 2175 - RNA, 19 nt, synthetic construct
  source 1..19: mol_type = other RNA
gcagagcacgatgaccagg

SEQ ID NO: 2176 - RNA, 19 nt, synthetic construct
  source 1..19: mol_type = other RNA
cagagcacgatgaccagga

SEQ ID NO: 2177 - RNA, 19 nt, synthetic construct
  source 1..19: mol_type = other RNA
agagcacgatgaccaggaa

SEQ ID NO: 2178 - RNA, 19 nt, synthetic construct
  source 1..19: mol_type = other RNA
gagcacgatgaccaggaag

SEQ ID NO: 2179 - RNA, 19 nt, synthetic construct
  source 1..19: mol_type = other RNA
agcacgatgaccaggaaga

SEQ ID NO: 2180 - RNA, 19 nt, synthetic construct
  source 1..19: mol_type = other RNA
gcacgatgaccaggaagat

SEQ ID NO: 2181 - RNA, 19 nt, synthetic construct
  source 1..19: mol_type = other RNA
cacgatgaccaggaagata

SEQ ID NO: 2182 - RNA, 19 nt, synthetic construct
  source 1..19: mol_type = other RNA
acgatgaccaggaagatat

SEQ ID NO: 2183 - RNA, 19 nt, synthetic construct
  source 1..19: mol_type = other RNA
cgatgaccaggaagatatc

SEQ ID NO: 2184 - RNA, 19 nt, synthetic construct
  source 1..19: mol_type = other RNA
gatgaccaggaagatatca

SEQ ID NO: 2185 - RNA, 19 nt, synthetic construct
  source 1..19: mol_type = other RNA
atgaccaggaagatatcag

SEQ ID NO: 2186 - RNA, 19 nt, synthetic construct
  source 1..19: mol_type = other RNA
tgaccaggaagatatcagt

SEQ ID NO: 2187 - RNA, 19 nt, synthetic construct
  source 1..19: mol_type = other RNA
gaccaggaagatatcagtc

SEQ ID NO: 2188 - RNA, 19 nt, synthetic construct
  source 1..19: mol_type = other RNA
accaggaagatatcagtcc

SEQ ID NO: 2189 - RNA, 19 nt, synthetic construct
  source 1..19: mol_type = other RNA
ccaggaagatatcagtcct

SEQ ID NO: 2190 - RNA, 19 nt, synthetic construct
  source 1..19: mol_type = other RNA
caggaagatatcagtccta

SEQ ID NO: 2191 - RNA, 19 nt, synthetic construct
  source 1..19: mol_type = other RNA
aggaagatatcagtcctag

SEQ ID NO: 2192 - RNA, 19 nt, synthetic construct
  source 1..19: mol_type = other RNA
ggaagatatcagtcctagt

SEQ ID NO: 2193 - RNA, 19 nt, synthetic construct
  source 1..19: mol_type = other RNA
gaagatatcagtcctagtc

SEQ ID NO: 2194 - RNA, 19 nt, synthetic construct
  source 1..19: mol_type = other RNA
aagatatcagtcctagtct

SEQ ID NO: 2195 - RNA, 19 nt, synthetic construct
  source 1..19: mol_type = other RNA
agatatcagtcctagtctt

SEQ ID NO: 2196 - RNA, 19 nt, synthetic construct
  source 1..19: mol_type = other RNA
gatatcagtcctagtcttg

SEQ ID NO: 2197 - RNA, 19 nt, synthetic construct
  source 1..19: mol_type = other RNA
atatcagtcctagtcttgc

SEQ ID NO: 2198 - RNA, 19 nt, synthetic construct
  source 1..19: mol_type = other RNA
tatcagtcctagtcttgct

SEQ ID NO: 2199 - RNA, 19 nt, synthetic construct
  source 1..19: mol_type = other RNA
atcagtcctagtcttgctg

SEQ ID NO: 2200 - RNA, 19 nt, synthetic construct
  source 1..19: mol_type = other RNA
tcagtcctagtcttgctga

SEQ ID NO: 2201 - RNA, 19 nt, synthetic construct
  source 1..19: mol_type = other RNA
cagtcctagtcttgctgag

SEQ ID NO: 2202 - RNA, 19 nt, synthetic construct
  source 1..19: mol_type = other RNA
agtcctagtcttgctgagc

SEQ ID NO: 2203 - RNA, 19 nt, synthetic construct
  source 1..19: mol_type = other RNA
gtcctagtcttgctgagca

SEQ ID NO: 2204 - RNA, 19 nt, synthetic construct
  source 1..19: mol_type = other RNA
tcctagtcttgctgagcag

SEQ ID NO: 2205 - RNA, 19 nt, synthetic construct
  source 1..19: mol_type = other RNA
cctagtcttgctgagcagc

SEQ ID NO: 2206 - RNA, 19 nt, synthetic construct
  source 1..19: mol_type = other RNA
ctagtcttgctgagcagca

SEQ ID NO: 2207 - RNA, 19 nt, synthetic construct
  source 1..19: mol_type = other RNA
tagtcttgctgagcagcag

SEQ ID NO: 2208 - RNA, 19 nt, synthetic construct
  source 1..19: mol_type = other RNA
agtcttgctgagcagcagt

SEQ ID NO: 2209 - RNA, 19 nt, synthetic construct
  source 1..19: mol_type = other RNA
gtcttgctgagcagcagtg

SEQ ID NO: 2210 - RNA, 19 nt, synthetic construct
  source 1..19: mol_type = other RNA
tcttgctgagcagcagtgg

SEQ ID NO: 2211 - RNA, 19 nt, synthetic construct
  source 1..19: mol_type = other RNA
cttgctgagcagcagtggg

SEQ ID NO: 2212 - RNA, 19 nt, synthetic construct
  source 1..19: mol_type = other RNA
ttgctgagcagcagtggga

SEQ ID NO: 2213 - RNA, 19 nt, synthetic construct
  source 1..19: mol_type = other RNA
tgctgagcagcagtgggac

SEQ ID NO: 2214 - RNA, 19 nt, synthetic construct
  source 1..19: mol_type = other RNA
gctgagcagcagtgggaca

SEQ ID NO: 2215 - RNA, 19 nt, synthetic construct
  source 1..19: mol_type = other RNA
ctgagcagcagtgggacaa

SEQ ID NO: 2216 - RNA, 19 nt, synthetic construct
  source 1..19: mol_type = other RNA
tgagcagcagtgggacaag

SEQ ID NO: 2217 - RNA, 19 nt, synthetic construct
  source 1..19: mol_type = other RNA
gagcagcagtgggacaaga

SEQ ID NO: 2218 - RNA, 19 nt, synthetic construct
  source 1..19: mol_type = other RNA
agcagcagtgggacaagaa

SEQ ID NO: 2219 - RNA, 19 nt, synthetic construct
  source 1..19: mol_type = other RNA
gcagcagtgggacaagaag

SEQ ID NO: 2220 - RNA, 19 nt, synthetic construct
  source 1..19: mol_type = other RNA
cagcagtgggacaagaagc

SEQ ID NO: 2221 - RNA, 19 nt, synthetic construct
  source 1..19: mol_type = other RNA
agcagtgggacaagaagct

SEQ ID NO: 2222 - RNA, 19 nt, synthetic construct
  source 1..19: mol_type = other RNA
gcagtgggacaagaagctt

SEQ ID NO: 2223 - RNA, 19 nt, synthetic construct
  source 1..19: mol_type = other RNA
cagtgggacaagaagcttc

SEQ ID NO: 2224 - RNA, 19 nt, synthetic construct
  source 1..19: mol_type = other RNA
agtgggacaagaagcttcc

SEQ ID NO: 2225 - RNA, 19 nt, synthetic construct
  source 1..19: mol_type = other RNA
gtgggacaagaagcttcca

SEQ ID NO: 2226 - RNA, 19 nt, synthetic construct
  source 1..19: mol_type = other RNA
tgggacaagaagcttccag

SEQ ID NO: 2227 - RNA, 19 nt, synthetic construct
  source 1..19: mol_type = other RNA
gggacaagaagcttccaga

SEQ ID NO: 2228 - RNA, 19 nt, synthetic construct
  source 1..19: mol_type = other RNA
ggacaagaagcttccagaa

SEQ ID NO: 2229 - RNA, 19 nt, synthetic construct
  source 1..19: mol_type = other RNA
gacaagaagcttccagaac

SEQ ID NO: 2230 - RNA, 19 nt, synthetic construct
  source 1..19: mol_type = other RNA
acaagaagcttccagaacc

SEQ ID NO: 2231 - RNA, 19 nt, synthetic construct
  source 1..19: mol_type = other RNA
caagaagcttccagaacct

SEQ ID NO: 2232 - RNA, 19 nt, synthetic construct
  source 1..19: mol_type = other RNA
aagaagcttccagaacctt

SEQ ID NO: 2233 - RNA, 19 nt, synthetic construct
  source 1..19: mol_type = other RNA
agaagcttccagaaccttt

SEQ ID NO: 2234 - RNA, 19 nt, synthetic construct
  source 1..19: mol_type = other RNA
gaagcttccagaacctttg

SEQ ID NO: 2235 - RNA, 19 nt, synthetic construct
  source 1..19: mol_type = other RNA
aagcttccagaacctttgt

SEQ ID NO: 2236 - RNA, 19 nt, synthetic construct
  source 1..19: mol_type = other RNA
agcttccagaacctttgtc

SEQ ID NO: 2237 - RNA, 19 nt, synthetic construct
  source 1..19: mol_type = other RNA
gcttccagaacctttgtct

SEQ ID NO: 2238 - RNA, 19 nt, synthetic construct
  source 1..19: mol_type = other RNA
cttccagaacctttgtctt

SEQ ID NO: 2239 - RNA, 19 nt, synthetic construct
  source 1..19: mol_type = other RNA
ttccagaacctttgtcttg

SEQ ID NO: 2240 - RNA, 19 nt, synthetic construct
  source 1..19: mol_type = other RNA
tccagaacctttgtcttgg

SEQ ID NO: 2241 - RNA, 19 nt, synthetic construct
  source 1..19: mol_type = other RNA
ccagaacctttgtcttgga

SEQ ID NO: 2242 - RNA, 19 nt, synthetic construct
  source 1..19: mol_type = other RNA
cagaacctttgtcttggag

SEQ ID NO: 2243 - RNA, 19 nt, synthetic construct
  source 1..19: mol_type = other RNA
agaacctttgtcttggaga

SEQ ID NO: 2244 - RNA, 19 nt, synthetic construct
  source 1..19: mol_type = other RNA
gaacctttgtcttggagaa

SEQ ID NO: 2245 - RNA, 19 nt, synthetic construct
  source 1..19: mol_type = other RNA
aacctttgtcttggagaag

SEQ ID NO: 2246 - RNA, 19 nt, synthetic construct
  source 1..19: mol_type = other RNA
acctttgtcttggagaagt

SEQ ID NO: 2247 - RNA, 19 nt, synthetic construct
  source 1..19: mol_type = other RNA
cctttgtcttggagaagtg

SEQ ID NO: 2248 - RNA, 19 nt, synthetic construct
  source 1..19: mol_type = other RNA
ctttgtcttggagaagtga

SEQ ID NO: 2249 - RNA, 19 nt, synthetic construct
  source 1..19: mol_type = other RNA
tttgtcttggagaagtgat

SEQ ID NO: 2250 - RNA, 19 nt, synthetic construct
  source 1..19: mol_type = other RNA
ttgtcttggagaagtgatg

SEQ ID NO: 2251 - RNA, 19 nt, synthetic construct
  source 1..19: mol_type = other RNA
tgtcttggagaagtgatga

SEQ ID NO: 2252 - RNA, 19 nt, synthetic construct
  source 1..19: mol_type = other RNA
gtcttggagaagtgatgaa

SEQ ID NO: 2253 - RNA, 19 nt, synthetic construct
  source 1..19: mol_type = other RNA
tcttggagaagtgatgaag

SEQ ID NO: 2254 - RNA, 19 nt, synthetic construct
  source 1..19: mol_type = other RNA
cttggagaagtgatgaaga

SEQ ID NO: 2255 - RNA, 19 nt, synthetic construct
  source 1..19: mol_type = other RNA
ttggagaagtgatgaagaa

SEQ ID NO: 2256 - RNA, 19 nt, synthetic construct
  source 1..19: mol_type = other RNA
tggagaagtgatgaagaag

SEQ ID NO: 2257 - RNA, 19 nt, synthetic construct
  source 1..19: mol_type = other RNA
ggagaagtgatgaagaaga

SEQ ID NO: 2258 - RNA, 19 nt, synthetic construct
  source 1..19: mol_type = other RNA
gagaagtgatgaagaagat

SEQ ID NO: 2259 - RNA, 19 nt, synthetic construct
  source 1..19: mol_type = other RNA
agaagtgatgaagaagatg

SEQ ID NO: 2260 - RNA, 19 nt, synthetic construct
  source 1..19: mol_type = other RNA
gaagtgatgaagaagatga

SEQ ID NO: 2261 - RNA, 19 nt, synthetic construct
  source 1..19: mol_type = other RNA
aagtgatgaagaagatgaa

SEQ ID NO: 2262 - RNA, 19 nt, synthetic construct
  source 1..19: mol_type = other RNA
agtgatgaagaagatgaag

SEQ ID NO: 2263 - RNA, 19 nt, synthetic construct
  source 1..19: mol_type = other RNA
gtgatgaagaagatgaaga

SEQ ID NO: 2264 - RNA, 19 nt, synthetic construct
  source 1..19: mol_type = other RNA
tgatgaagaagatgaagac

SEQ ID NO: 2265 - RNA, 19 nt, synthetic construct
  source 1..19: mol_type = other RNA
gatgaagaagatgaagaca

SEQ ID NO: 2266 - RNA, 19 nt, synthetic construct
  source 1..19: mol_type = other RNA
atgaagaagatgaagacag

SEQ ID NO: 2267 - RNA, 19 nt, synthetic construct
  source 1..19: mol_type = other RNA
tgaagaagatgaagacagt

SEQ ID NO: 2268 - RNA, 19 nt, synthetic construct
  source 1..19: mol_type = other RNA
gaagaagatgaagacagtg

SEQ ID NO: 2269 - RNA, 19 nt, synthetic construct
  source 1..19: mol_type = other RNA
aagaagatgaagacagtga

SEQ ID NO: 2270 - RNA, 19 nt, synthetic construct
  source 1..19: mol_type = other RNA
agaagatgaagacagtgac

SEQ ID NO: 2271 - RNA, 19 nt, synthetic construct
  source 1..19: mol_type = other RNA
gaagatgaagacagtgact

SEQ ID NO: 2272 - RNA, 19 nt, synthetic construct
  source 1..19: mol_type = other RNA
aagatgaagacagtgactt

SEQ ID NO: 2273 - RNA, 19 nt, synthetic construct
  source 1..19: mol_type = other RNA
agatgaagacagtgacttt

SEQ ID NO: 2274 - RNA, 19 nt, synthetic construct
  source 1..19: mol_type = other RNA
gatgaagacagtgactttg

SEQ ID NO: 2275 - RNA, 19 nt, synthetic construct
  source 1..19: mol_type = other RNA
atgaagacagtgactttgg

SEQ ID NO: 2276 - RNA, 19 nt, synthetic construct
  source 1..19: mol_type = other RNA
tgaagacagtgactttggg

SEQ ID NO: 2277 - RNA, 19 nt, synthetic construct
  source 1..19: mol_type = other RNA
gaagacagtgactttgggg

SEQ ID NO: 2278 - RNA, 19 nt, synthetic construct
  source 1..19: mol_type = other RNA
aagacagtgactttgggga

SEQ ID NO: 2279 - RNA, 19 nt, synthetic construct
  source 1..19: mol_type = other RNA
agacagtgactttggggag

SEQ ID NO: 2280 - RNA, 19 nt, synthetic construct
  source 1..19: mol_type = other RNA
gacagtgactttggggagg

SEQ ID NO: 2281 - RNA, 19 nt, synthetic construct
  source 1..19: mol_type = other RNA
acagtgactttggggagga

SEQ ID NO: 2282 - RNA, 19 nt, synthetic construct
  source 1..19: mol_type = other RNA
cagtgactttggggaggaa

SEQ ID NO: 2283 - RNA, 19 nt, synthetic construct
  source 1..19: mol_type = other RNA
agtgactttggggaggaac

SEQ ID NO: 2284 - RNA, 19 nt, synthetic construct
  source 1..19: mol_type = other RNA
gtgactttggggaggaaca

SEQ ID NO: 2285 - RNA, 19 nt, synthetic construct
  source 1..19: mol_type = other RNA
tgactttggggaggaacag

SEQ ID NO: 2286 - RNA, 19 nt, synthetic construct
  source 1..19: mol_type = other RNA
gactttggggaggaacagc

SEQ ID NO: 2287 - RNA, 19 nt, synthetic construct
  source 1..19: mol_type = other RNA
actttggggaggaacagcg

SEQ ID NO: 2288 - RNA, 19 nt, synthetic construct
  source 1..19: mol_type = other RNA
ctttggggaggaacagcga

SEQ ID NO: 2289 - RNA, 19 nt, synthetic construct
  source 1..19: mol_type = other RNA
tttggggaggaacagcgag

SEQ ID NO: 2290 - RNA, 19 nt, synthetic construct
  source 1..19: mol_type = other RNA
ttggggaggaacagcgaga

SEQ ID NO: 2291 - RNA, 19 nt, synthetic construct
  source 1..19: mol_type = other RNA
tggggaggaacagcgagat

SEQ ID NO: 2292 - RNA, 19 nt, synthetic construct
  source 1..19: mol_type = other RNA
ggggaggaacagcgagatt

SEQ ID NO: 2293 - RNA, 19 nt, synthetic construct
  source 1..19: mol_type = other RNA
gggaggaacagcgagattg

SEQ ID NO: 2294 - RNA, 19 nt, synthetic construct
  source 1..19: mol_type = other RNA
ggaggaacagcgagattgc

SEQ ID NO: 2295 - RNA, 19 nt, synthetic construct
  source 1..19: mol_type = other RNA
gaggaacagcgagattgct

SEQ ID NO: 2296 - RNA, 19 nt, synthetic construct
  source 1..19: mol_type = other RNA
aggaacagcgagattgcta

SEQ ID NO: 2297 - RNA, 19 nt, synthetic construct
  source 1..19: mol_type = other RNA
ggaacagcgagattgctac

SEQ ID NO: 2298 - RNA, 19 nt, synthetic construct
  source 1..19: mol_type = other RNA
gaacagcgagattgctacc

SEQ ID NO: 2299 - RNA, 19 nt, synthetic construct
  source 1..19: mol_type = other RNA
aacagcgagattgctacct

SEQ ID NO: 2300 - RNA, 19 nt, synthetic construct
  source 1..19: mol_type = other RNA
acagcgagattgctacctg

SEQ ID NO: 2301 - RNA, 19 nt, synthetic construct
  source 1..19: mol_type = other RNA
cagcgagattgctacctga

SEQ ID NO: 2302 - RNA, 19 nt, synthetic construct
  source 1..19: mol_type = other RNA
agcgagattgctacctgaa

SEQ ID NO: 2303 - RNA, 19 nt, synthetic construct
  source 1..19: mol_type = other RNA
gcgagattgctacctgaag

SEQ ID NO: 2304 - RNA, 19 nt, synthetic construct
  source 1..19: mol_type = other RNA
cgagattgctacctgaagg

SEQ ID NO: 2305 - RNA, 19 nt, synthetic construct
  source 1..19: mol_type = other RNA
gagattgctacctgaaggt

SEQ ID NO: 2306 - RNA, 19 nt, synthetic construct
  source 1..19: mol_type = other RNA
agattgctacctgaaggtg

SEQ ID NO: 2307 - RNA, 19 nt, synthetic construct
  source 1..19: mol_type = other RNA
gattgctacctgaaggtga

SEQ ID NO: 2308 - RNA, 19 nt, synthetic construct
  source 1..19: mol_type = other RNA
attgctacctgaaggtgag

SEQ ID NO: 2309 - RNA, 19 nt, synthetic construct
  source 1..19: mol_type = other RNA
ttgctacctgaaggtgagc

SEQ ID NO: 2310 - RNA, 19 nt, synthetic construct
  source 1..19: mol_type = other RNA
tgctacctgaaggtgagcc

SEQ ID NO: 2311 - RNA, 19 nt, synthetic construct
  source 1..19: mol_type = other RNA
gctacctgaaggtgagcca

SEQ ID NO: 2312 - RNA, 19 nt, synthetic construct
  source 1..19: mol_type = other RNA
ctacctgaaggtgagccaa

SEQ ID NO: 2313 - RNA, 19 nt, synthetic construct
  source 1..19: mol_type = other RNA
tacctgaaggtgagccaat

SEQ ID NO: 2314 - RNA, 19 nt, synthetic construct
  source 1..19: mol_type = other RNA
acctgaaggtgagccaatc

SEQ ID NO: 2315 - RNA, 19 nt, synthetic construct
  source 1..19: mol_type = other RNA
cctgaaggtgagccaatcc

SEQ ID NO: 2316 - RNA, 19 nt, synthetic construct
  source 1..19: mol_type = other RNA
ctgaaggtgagccaatcca

SEQ ID NO: 2317 - RNA, 19 nt, synthetic construct
  source 1..19: mol_type = other RNA
tgaaggtgagccaatccaa

SEQ ID NO: 2318 - RNA, 19 nt, synthetic construct
  source 1..19: mol_type = other RNA
gaaggtgagccaatccaag

SEQ ID NO: 2319 - RNA, 19 nt, synthetic construct
  source 1..19: mol_type = other RNA
aaggtgagccaatccaagg

SEQ ID NO: 2320 - RNA, 19 nt, synthetic construct
  source 1..19: mol_type = other RNA
aggtgagccaatccaagga

SEQ ID NO: 2321 - RNA, 19 nt, synthetic construct
  source 1..19: mol_type = other RNA
ggtgagccaatccaaggag

SEQ ID NO: 2322 - RNA, 19 nt, synthetic construct
  source 1..19: mol_type = other RNA
gtgagccaatccaaggagc

SEQ ID NO: 2323 - RNA, 19 nt, synthetic construct
  source 1..19: mol_type = other RNA
tgagccaatccaaggagca

SEQ ID NO: 2324 - RNA, 19 nt, synthetic construct
  source 1..19: mol_type = other RNA
gagccaatccaaggagcac

SEQ ID NO: 2325 - RNA, 19 nt, synthetic construct
  source 1..19: mol_type = other RNA
agccaatccaaggagcacc

SEQ ID NO: 2326 - RNA, 19 nt, synthetic construct
  source 1..19: mol_type = other RNA
gccaatccaaggagcacca

SEQ ID NO: 2327 - RNA, 19 nt, synthetic construct
  source 1..19: mol_type = other RNA
ccaatccaaggagcaccag

SEQ ID NO: 2328 - RNA, 19 nt, synthetic construct
  source 1..19: mol_type = other RNA
caatccaaggagcaccagc

SEQ ID NO: 2329 - RNA, 19 nt, synthetic construct
  source 1..19: mol_type = other RNA
aatccaaggagcaccagca

SEQ ID NO: 2330 - RNA, 19 nt, synthetic construct
  source 1..19: mol_type = other RNA
atccaaggagcaccagcag

SEQ ID NO: 2331 - RNA, 19 nt, synthetic construct
  source 1..19: mol_type = other RNA
tccaaggagcaccagcagt

SEQ ID NO: 2332 - RNA, 19 nt, synthetic construct
  source 1..19: mol_type = other RNA
ccaaggagcaccagcagtt

SEQ ID NO: 2333 - RNA, 19 nt, synthetic construct
  source 1..19: mol_type = other RNA
caaggagcaccagcagttt

SEQ ID NO: 2334 - RNA, 19 nt, synthetic construct
  source 1..19: mol_type = other RNA
aaggagcaccagcagttta

SEQ ID NO: 2335 - RNA, 19 nt, synthetic construct
  source 1..19: mol_type = other RNA
aggagcaccagcagtttat

SEQ ID NO: 2336 - RNA, 19 nt, synthetic construct
  source 1..19: mol_type = other RNA
ggagcaccagcagtttatc

SEQ ID NO: 2337 - RNA, 19 nt, synthetic construct
  source 1..19: mol_type = other RNA
gagcaccagcagtttatca

SEQ ID NO: 2338 - RNA, 19 nt, synthetic construct
  source 1..19: mol_type = other RNA
agcaccagcagtttatcac

SEQ ID NO: 2339 - RNA, 19 nt, synthetic construct
  source 1..19: mol_type = other RNA
gcaccagcagtttatcacc

SEQ ID NO: 2340 - RNA, 19 nt, synthetic construct
  source 1..19: mol_type = other RNA
caccagcagtttatcacct

SEQ ID NO: 2341 - RNA, 19 nt, synthetic construct
  source 1..19: mol_type = other RNA
accagcagtttatcacctt

SEQ ID NO: 2342 - RNA, 19 nt, synthetic construct
  source 1..19: mol_type = other RNA
ccagcagtttatcaccttc

SEQ ID NO: 2343 - RNA, 19 nt, synthetic construct
  source 1..19: mol_type = other RNA
cagcagtttatcaccttct

SEQ ID NO: 2344 - RNA, 19 nt, synthetic construct
  source 1..19: mol_type = other RNA
agcagtttatcaccttctt

SEQ ID NO: 2345 - RNA, 19 nt, synthetic construct
  source 1..19: mol_type = other RNA
gcagtttatcaccttctta

SEQ ID NO: 2346 - RNA, 19 nt, synthetic construct
  source 1..19: mol_type = other RNA
cagtttatcaccttcttac

SEQ ID NO: 2347 - RNA, 19 nt, synthetic construct
  source 1..19: mol_type = other RNA
agtttatcaccttcttaca

SEQ ID NO: 2348 - RNA, 19 nt, synthetic construct
  source 1..19: mol_type = other RNA
gtttatcaccttcttacag

SEQ ID NO: 2349 - RNA, 19 nt, synthetic construct
  source 1..19: mol_type = other RNA
tttatcaccttcttacaga

SEQ ID NO: 2350 - RNA, 19 nt, synthetic construct
  source 1..19: mol_type = other RNA
ttatcaccttcttacagag

SEQ ID NO: 2351 - RNA, 19 nt, synthetic construct
  source 1..19: mol_type = other RNA
tatcaccttcttacagaga

SEQ ID NO: 2352 - RNA, 19 nt, synthetic construct
  source 1..19: mol_type = other RNA
atcaccttcttacagagac

SEQ ID NO: 2353 - RNA, 19 nt, synthetic construct
  source 1..19: mol_type = other RNA
tcaccttcttacagagact

SEQ ID NO: 2354 - RNA, 19 nt, synthetic construct
  source 1..19: mol_type = other RNA
caccttcttacagagactc

SEQ ID NO: 2355 - RNA, 19 nt, synthetic construct
  source 1..19: mol_type = other RNA
accttcttacagagactcc

SEQ ID NO: 2356 - RNA, 19 nt, synthetic construct
  source 1..19: mol_type = other RNA
ccttcttacagagactcct

SEQ ID NO: 2357 - RNA, 19 nt, synthetic construct
  source 1..19: mol_type = other RNA
cttcttacagagactcctt

SEQ ID NO: 2358 - RNA, 19 nt, synthetic construct
  source 1..19: mol_type = other RNA
ttcttacagagactccttg

SEQ ID NO: 2359 - RNA, 19 nt, synthetic construct
  source 1..19: mol_type = other RNA
tcttacagagactccttgg

SEQ ID NO: 2360 - RNA, 19 nt, synthetic construct
  source 1..19: mol_type = other RNA
cttacagagactccttggg

SEQ ID NO: 2361 - RNA, 19 nt, synthetic construct
  source 1..19: mol_type = other RNA
ttacagagactccttgggc

SEQ ID NO: 2362 - RNA, 19 nt, synthetic construct
  source 1..19: mol_type = other RNA
tacagagactccttgggcc

SEQ ID NO: 2363 - RNA, 19 nt, synthetic construct
  source 1..19: mol_type = other RNA
acagagactccttgggcct

SEQ ID NO: 2364 - RNA, 19 nt, synthetic construct
  source 1..19: mol_type = other RNA
cagagactccttgggcctt

SEQ ID NO: 2365 - RNA, 19 nt, synthetic construct
  source 1..19: mol_type = other RNA
agagactccttgggccttt

SEQ ID NO: 2366 - RNA, 19 nt, synthetic construct
  source 1..19: mol_type = other RNA
gagactccttgggcctttg

SEQ ID NO: 2367 - RNA, 19 nt, synthetic construct
  source 1..19: mol_type = other RNA
agactccttgggcctttgc

SEQ ID NO: 2368 - RNA, 19 nt, synthetic construct
  source 1..19: mol_type = other RNA
gactccttgggcctttgct

SEQ ID NO: 2369 - RNA, 19 nt, synthetic construct
  source 1..19: mol_type = other RNA
actccttgggcctttgctg

SEQ ID NO: 2370 - RNA, 19 nt, synthetic construct
  source 1..19: mol_type = other RNA
ctccttgggcctttgctgg

SEQ ID NO: 2371 - RNA, 19 nt, synthetic construct
  source 1..19: mol_type = other RNA
tccttgggcctttgctgga

SEQ ID NO: 2372 - RNA, 19 nt, synthetic construct
  source 1..19: mol_type = other RNA
ccttgggcctttgctggag

SEQ ID NO: 2373 - RNA, 19 nt, synthetic construct
  source 1..19: mol_type = other RNA
cttgggcctttgctggagg

SEQ ID NO: 2374 - RNA, 19 nt, synthetic construct
  source 1..19: mol_type = other RNA
ttgggcctttgctggaggc

SEQ ID NO: 2375 - RNA, 19 nt, synthetic construct
  source 1..19: mol_type = other RNA
tgggcctttgctggaggcc

SEQ ID NO: 2376 - RNA, 19 nt, synthetic construct
  source 1..19: mol_type = other RNA
gggcctttgctggaggcct

SEQ ID NO: 2377 - RNA, 19 nt, synthetic construct
  source 1..19: mol_type = other RNA
ggcctttgctggaggccta

SEQ ID NO: 2378 - RNA, 19 nt, synthetic construct
  source 1..19: mol_type = other RNA
gcctttgctggaggcctac

SEQ ID NO: 2379 - RNA, 19 nt, synthetic construct
  source 1..19: mol_type = other RNA
cctttgctggaggcctaca

SEQ ID NO: 2380 - RNA, 19 nt, synthetic construct
  source 1..19: mol_type = other RNA
ctttgctggaggcctacag

SEQ ID NO: 2381 - RNA, 19 nt, synthetic construct
  source 1..19: mol_type = other RNA
tttgctggaggcctacagc

SEQ ID NO: 2382 - RNA, 19 nt, synthetic construct
  source 1..19: mol_type = other RNA
ttgctggaggcctacagct

SEQ ID NO: 2383 - RNA, 19 nt, synthetic construct
  source 1..19: mol_type = other RNA
tgctggaggcctacagctc

SEQ ID NO: 2384 - RNA, 19 nt, synthetic construct
  source 1..19: mol_type = other RNA
gctggaggcctacagctct

SEQ ID NO: 2385 - RNA, 19 nt, synthetic construct
  source 1..19: mol_type = other RNA
ctggaggcctacagctctg

SEQ ID NO: 2386 - RNA, 19 nt, synthetic construct
  source 1..19: mol_type = other RNA
tggaggcctacagctctgc

SEQ ID NO: 2387 - RNA, 19 nt, synthetic construct
  source 1..19: mol_type = other RNA
ggaggcctacagctctgct

SEQ ID NO: 2388 - RNA, 19 nt, synthetic construct
  source 1..19: mol_type = other RNA
gaggcctacagctctgctg

SEQ ID NO: 2389 - RNA, 19 nt, synthetic construct
  source 1..19: mol_type = other RNA
aggcctacagctctgctgc

SEQ ID NO: 2390 - RNA, 19 nt, synthetic construct
  source 1..19: mol_type = other RNA
ggcctacagctctgctgcc

SEQ ID NO: 2391 - RNA, 19 nt, synthetic construct
  source 1..19: mol_type = other RNA
gcctacagctctgctgcca

SEQ ID NO: 2392 - RNA, 19 nt, synthetic construct
  source 1..19: mol_type = other RNA
cctacagctctgctgccat

SEQ ID NO: 2393 - RNA, 19 nt, synthetic construct
  source 1..19: mol_type = other RNA
ctacagctctgctgccatc

SEQ ID NO: 2394 - RNA, 19 nt, synthetic construct
  source 1..19: mol_type = other RNA
tacagctctgctgccatct

SEQ ID NO: 2395 - RNA, 19 nt, synthetic construct
  source 1..19: mol_type = other RNA
acagctctgctgccatctt

SEQ ID NO: 2396 - RNA, 19 nt, synthetic construct
  source 1..19: mol_type = other RNA
cagctctgctgccatcttt

SEQ ID NO: 2397 - RNA, 19 nt, synthetic construct
  source 1..19: mol_type = other RNA
agctctgctgccatctttg

SEQ ID NO: 2398 - RNA, 19 nt, synthetic construct
  source 1..19: mol_type = other RNA
gctctgctgccatctttgt

SEQ ID NO: 2399 - RNA, 19 nt, synthetic construct
  source 1..19: mol_type = other RNA
ctctgctgccatctttgtt

SEQ ID NO: 2400 - RNA, 19 nt, synthetic construct
  source 1..19: mol_type = other RNA
tctgctgccatctttgttc

SEQ ID NO: 2401 - RNA, 19 nt, synthetic construct
  source 1..19: mol_type = other RNA
ctgctgccatctttgttca

SEQ ID NO: 2402 - RNA, 19 nt, synthetic construct
  source 1..19: mol_type = other RNA
tgctgccatctttgttcac

SEQ ID NO: 2403 - RNA, 19 nt, synthetic construct
  source 1..19: mol_type = other RNA
gctgccatctttgttcaca

SEQ ID NO: 2404 - RNA, 19 nt, synthetic construct
  source 1..19: mol_type = other RNA
ctgccatctttgttcacaa

SEQ ID NO: 2405 - RNA, 19 nt, synthetic construct
  source 1..19: mol_type = other RNA
tgccatctttgttcacaac

SEQ ID NO: 2406 - RNA, 19 nt, synthetic construct
  source 1..19: mol_type = other RNA
gccatctttgttcacaact

SEQ ID NO: 2407 - RNA, 19 nt, synthetic construct
  source 1..19: mol_type = other RNA
ccatctttgttcacaactt

SEQ ID NO: 2408 - RNA, 19 nt, synthetic construct
  source 1..19: mol_type = other RNA
catctttgttcacaacttc

SEQ ID NO: 2409 - RNA, 19 nt, synthetic construct
  source 1..19: mol_type = other RNA
atctttgttcacaacttca

SEQ ID NO: 2410 - RNA, 19 nt, synthetic construct
  source 1..19: mol_type = other RNA
tctttgttcacaacttcag

SEQ ID NO: 2411 - RNA, 19 nt, synthetic construct
  source 1..19: mol_type = other RNA
ctttgttcacaacttcagt

SEQ ID NO: 2412 - RNA, 19 nt, synthetic construct
  source 1..19: mol_type = other RNA
tttgttcacaacttcagtg

SEQ ID NO: 2413 - RNA, 19 nt, synthetic construct
  source 1..19: mol_type = other RNA
ttgttcacaacttcagtgg

SEQ ID NO: 2414 - RNA, 19 nt, synthetic construct
  source 1..19: mol_type = other RNA
tgttcacaacttcagtggt

SEQ ID NO: 2415 - RNA, 19 nt, synthetic construct
  source 1..19: mol_type = other RNA
gttcacaacttcagtggtc

SEQ ID NO: 2416 - RNA, 19 nt, synthetic construct
  source 1..19: mol_type = other RNA
ttcacaacttcagtggtcc

SEQ ID NO: 2417 - RNA, 19 nt, synthetic construct
  source 1..19: mol_type = other RNA
tcacaacttcagtggtcct

SEQ ID NO: 2418 - RNA, 19 nt, synthetic construct
  source 1..19: mol_type = other RNA
cacaacttcagtggtcctg

SEQ ID NO: 2419 - RNA, 19 nt, synthetic construct
  source 1..19: mol_type = other RNA
acaacttcagtggtcctgt

SEQ ID NO: 2420 - RNA, 19 nt, synthetic construct
  source 1..19: mol_type = other RNA
caacttcagtggtcctgtt

SEQ ID NO: 2421 - RNA, 19 nt, synthetic construct
  source 1..19: mol_type = other RNA
aacttcagtggtcctgttc

SEQ ID NO: 2422 - RNA, 19 nt, synthetic construct
  source 1..19: mol_type = other RNA
acttcagtggtcctgttcc

SEQ ID NO: 2423 - RNA, 19 nt, synthetic construct
  source 1..19: mol_type = other RNA
cttcagtggtcctgttcca

SEQ ID NO: 2424 - RNA, 19 nt, synthetic construct
  source 1..19: mol_type = other RNA
ttcagtggtcctgttccag

SEQ ID NO: 2425 - RNA, 19 nt, synthetic construct
  source 1..19: mol_type = other RNA
tcagtggtcctgttccaga

SEQ ID NO: 2426 - RNA, 19 nt, synthetic construct
  source 1..19: mol_type = other RNA
cagtggtcctgttccagaa

SEQ ID NO: 2427 - RNA, 19 nt, synthetic construct
  source 1..19: mol_type = other RNA
agtggtcctgttccagaac

SEQ ID NO: 2428 - RNA, 19 nt, synthetic construct
  source 1..19: mol_type = other RNA
gtggtcctgttccagaacc

SEQ ID NO: 2429 - RNA, 19 nt, synthetic construct
  source 1..19: mol_type = other RNA
tggtcctgttccagaacct

SEQ ID NO: 2430 - RNA, 19 nt, synthetic construct
  source 1..19: mol_type = other RNA
ggtcctgttccagaacctg

SEQ ID NO: 2431 - RNA, 19 nt, synthetic construct
  source 1..19: mol_type = other RNA
gtcctgttccagaacctga

SEQ ID NO: 2432 - RNA, 19 nt, synthetic construct
  source 1..19: mol_type = other RNA
tcctgttccagaacctgag

SEQ ID NO: 2433 - RNA, 19 nt, synthetic construct
  source 1..19: mol_type = other RNA
cctgttccagaacctgagt

SEQ ID NO: 2434 - RNA, 19 nt, synthetic construct
  source 1..19: mol_type = other RNA
ctgttccagaacctgagta

SEQ ID NO: 2435 - RNA, 19 nt, synthetic construct
  source 1..19: mol_type = other RNA
tgttccagaacctgagtat

SEQ ID NO: 2436 - RNA, 19 nt, synthetic construct
  source 1..19: mol_type = other RNA
gttccagaacctgagtatc

SEQ ID NO: 2437 - RNA, 19 nt, synthetic construct
  source 1..19: mol_type = other RNA
ttccagaacctgagtatct

SEQ ID NO: 2438 - RNA, 19 nt, synthetic construct
  source 1..19: mol_type = other RNA
tccagaacctgagtatctg

SEQ ID NO: 2439 - RNA, 19 nt, synthetic construct
  source 1..19: mol_type = other RNA
ccagaacctgagtatctgc

SEQ ID NO: 2440 - RNA, 19 nt, synthetic construct
  source 1..19: mol_type = other RNA
cagaacctgagtatctgca

SEQ ID NO: 2441 - RNA, 19 nt, synthetic construct
  source 1..19: mol_type = other RNA
agaacctgagtatctgcaa

SEQ ID NO: 2442 - RNA, 19 nt, synthetic construct
  source 1..19: mol_type = other RNA
gaacctgagtatctgcaaa

SEQ ID NO: 2443 - RNA, 19 nt, synthetic construct
  source 1..19: mol_type = other RNA
aacctgagtatctgcaaaa

SEQ ID NO: 2444 - RNA, 19 nt, synthetic construct
  source 1..19: mol_type = other RNA
acctgagtatctgcaaaag

SEQ ID NO: 2445 - RNA, 19 nt, synthetic construct
  source 1..19: mol_type = other RNA
cctgagtatctgcaaaagt

SEQ ID NO: 2446 - RNA, 19 nt, synthetic construct
  source 1..19: mol_type = other RNA
ctgagtatctgcaaaagtt

SEQ ID NO: 2447 - RNA, 19 nt, synthetic construct
  source 1..19: mol_type = other RNA
tgagtatctgcaaaagttg

SEQ ID NO: 2448 - RNA, 19 nt, synthetic construct
  source 1..19: mol_type = other RNA
gagtatctgcaaaagttgc

SEQ ID NO: 2449 - RNA, 19 nt, synthetic construct
  source 1..19: mol_type = other RNA
agtatctgcaaaagttgca

SEQ ID NO: 2450 - RNA, 19 nt, synthetic construct
  source 1..19: mol_type = other RNA
gtatctgcaaaagttgcac

SEQ ID NO: 2451 - RNA, 19 nt, synthetic construct
  source 1..19: mol_type = other RNA
tatctgcaaaagttgcaca

SEQ ID NO: 2452 - RNA, 19 nt, synthetic construct
  source 1..19: mol_type = other RNA
atctgcaaaagttgcacaa

SEQ ID NO: 2453 - RNA, 19 nt, synthetic construct
  source 1..19: mol_type = other RNA
tctgcaaaagttgcacaaa

SEQ ID NO: 2454 - RNA, 19 nt, synthetic construct
  source 1..19: mol_type = other RNA
ctgcaaaagttgcacaaat

SEQ ID NO: 2455 - RNA, 19 nt, synthetic construct
  source 1..19: mol_type = other RNA
tgcaaaagttgcacaaata

SEQ ID NO: 2456 - RNA, 19 nt, synthetic construct
  source 1..19: mol_type = other RNA
gcaaaagttgcacaaatac

SEQ ID NO: 2457 - RNA, 19 nt, synthetic construct
  source 1..19: mol_type = other RNA
caaaagttgcacaaatacc

SEQ ID NO: 2458 - RNA, 19 nt, synthetic construct
  source 1..19: mol_type = other RNA
aaaagttgcacaaatacct

SEQ ID NO: 2459 - RNA, 19 nt, synthetic construct
  source 1..19: mol_type = other RNA
aaagttgcacaaataccta

SEQ ID NO: 2460 - RNA, 19 nt, synthetic construct
  source 1..19: mol_type = other RNA
aagttgcacaaatacctaa

SEQ ID NO: 2461 - RNA, 19 nt, synthetic construct
  source 1..19: mol_type = other RNA
agttgcacaaatacctaat

SEQ ID NO: 2462 - RNA, 19 nt, synthetic construct
  source 1..19: mol_type = other RNA
gttgcacaaatacctaata

SEQ ID NO: 2463 - RNA, 19 nt, synthetic construct
  source 1..19: mol_type = other RNA
ttgcacaaatacctaataa

SEQ ID NO: 2464 - RNA, 19 nt, synthetic construct
  source 1..19: mol_type = other RNA
tgcacaaatacctaataac

SEQ ID NO: 2465 - RNA, 19 nt, synthetic construct
  source 1..19: mol_type = other RNA
gcacaaatacctaataacc

SEQ ID NO: 2466 - RNA, 19 nt, synthetic construct
  source 1..19: mol_type = other RNA
cacaaatacctaataacca

SEQ ID NO: 2467 - RNA, 19 nt, synthetic construct
  source 1..19: mol_type = other RNA
acaaatacctaataaccag

SEQ ID NO: 2468 - RNA, 19 nt, synthetic construct
  source 1..19: mol_type = other RNA
caaatacctaataaccaga

SEQ ID NO: 2469 - RNA, 19 nt, synthetic construct
  source 1..19: mol_type = other RNA
aaatacctaataaccagaa

SEQ ID NO: 2470 - RNA, 19 nt, synthetic construct
  source 1..19: mol_type = other RNA
aatacctaataaccagaac

SEQ ID NO: 2471 - RNA, 19 nt, synthetic construct
  source 1..19: mol_type = other RNA
atacctaataaccagaaca

SEQ ID NO: 2472 - RNA, 19 nt, synthetic construct
  source 1..19: mol_type = other RNA
tacctaataaccagaacag

SEQ ID NO: 2473 - RNA, 19 nt, synthetic construct
  source 1..19: mol_type = other RNA
acctaataaccagaacaga

SEQ ID NO: 2474 - RNA, 19 nt, synthetic construct
  source 1..19: mol_type = other RNA
cctaataaccagaacagaa

SEQ ID NO: 2475 - RNA, 19 nt, synthetic construct
  source 1..19: mol_type = other RNA
ctaataaccagaacagaaa

SEQ ID NO: 2476 - RNA, 19 nt, synthetic construct
  source 1..19: mol_type = other RNA
taataaccagaacagaaag

SEQ ID NO: 2477 - RNA, 19 nt, synthetic construct
  source 1..19: mol_type = other RNA
aataaccagaacagaaaga

SEQ ID NO: 2478 - RNA, 19 nt, synthetic construct
  source 1..19: mol_type = other RNA
ataaccagaacagaaagaa

SEQ ID NO: 2479 - RNA, 19 nt, synthetic construct
  source 1..19: mol_type = other RNA
taaccagaacagaaagaaa

SEQ ID NO: 2480 - RNA, 19 nt, synthetic construct
  source 1..19: mol_type = other RNA
aaccagaacagaaagaaat

SEQ ID NO: 2481 - RNA, 19 nt, synthetic construct
  source 1..19: mol_type = other RNA
accagaacagaaagaaatg

SEQ ID NO: 2482 - RNA, 19 nt, synthetic construct
  source 1..19: mol_type = other RNA
ccagaacagaaagaaatgt

SEQ ID NO: 2483 - RNA, 19 nt, synthetic construct
  source 1..19: mol_type = other RNA
cagaacagaaagaaatgtt

SEQ ID NO: 2484 - RNA, 19 nt, synthetic construct
  source 1..19: mol_type = other RNA
agaacagaaagaaatgttg

SEQ ID NO: 2485 - RNA, 19 nt, synthetic construct
  source 1..19: mol_type = other RNA
gaacagaaagaaatgttgc

SEQ ID NO: 2486 - RNA, 19 nt, synthetic construct
  source 1..19: mol_type = other RNA
aacagaaagaaatgttgca

SEQ ID NO: 2487 - RNA, 19 nt, synthetic construct
  source 1..19: mol_type = other RNA
acagaaagaaatgttgcag

SEQ ID NO: 2488 - RNA, 19 nt, synthetic construct
  source 1..19: mol_type = other RNA
cagaaagaaatgttgcagt

SEQ ID NO: 2489 - RNA, 19 nt, synthetic construct
  source 1..19: mol_type = other RNA
agaaagaaatgttgcagta

SEQ ID NO: 2490 - RNA, 19 nt, synthetic construct
  source 1..19: mol_type = other RNA
gaaagaaatgttgcagtat

SEQ ID NO: 2491 - RNA, 19 nt, synthetic construct
  source 1..19: mol_type = other RNA
aaagaaatgttgcagtata

SEQ ID NO: 2492 - RNA, 19 nt, synthetic construct
  source 1..19: mol_type = other RNA
aagaaatgttgcagtatat

SEQ ID NO: 2493 - RNA, 19 nt, synthetic construct
  source 1..19: mol_type = other RNA
agaaatgttgcagtatatg

SEQ ID NO: 2494 - RNA, 19 nt, synthetic construct
  source 1..19: mol_type = other RNA
gaaatgttgcagtatatgc

SEQ ID NO: 2495 - RNA, 19 nt, synthetic construct
  source 1..19: mol_type = other RNA
aaatgttgcagtatatgct

SEQ ID NO: 2496 - RNA, 19 nt, synthetic construct
  source 1..19: mol_type = other RNA
aatgttgcagtatatgctg

SEQ ID NO: 2497 - RNA, 19 nt, synthetic construct
  source 1..19: mol_type = other RNA
atgttgcagtatatgctga

SEQ ID NO: 2498 - RNA, 19 nt, synthetic construct
  source 1..19: mol_type = other RNA
tgttgcagtatatgctgag

SEQ ID NO: 2499 - RNA, 19 nt, synthetic construct
  source 1..19: mol_type = other RNA
gttgcagtatatgctgaga

SEQ ID NO: 2500 - RNA, 19 nt, synthetic construct
  source 1..19: mol_type = other RNA
ttgcagtatatgctgagag

SEQ ID NO: 2501 - RNA, 19 nt, synthetic construct
  source 1..19: mol_type = other RNA
tgcagtatatgctgagagt

SEQ ID NO: 2502 - RNA, 19 nt, synthetic construct
  source 1..19: mol_type = other RNA
gcagtatatgctgagagtg

SEQ ID NO: 2503 - RNA, 19 nt, synthetic construct
  source 1..19: mol_type = other RNA
cagtatatgctgagagtgc

SEQ ID NO: 2504 - RNA, 19 nt, synthetic construct
  source 1..19: mol_type = other RNA
agtatatgctgagagtgcc

SEQ ID NO: 2505 - RNA, 19 nt, synthetic construct
  source 1..19: mol_type = other RNA
gtatatgctgagagtgcca

SEQ ID NO: 2506 - RNA, 19 nt, synthetic construct
  source 1..19: mol_type = other RNA
tatatgctgagagtgccac

SEQ ID NO: 2507 - RNA, 19 nt, synthetic construct
  source 1..19: mol_type = other RNA
atatgctgagagtgccaca

SEQ ID NO: 2508 - RNA, 19 nt, synthetic construct
  source 1..19: mol_type = other RNA
tatgctgagagtgccacat

SEQ ID NO: 2509 - RNA, 19 nt, synthetic construct
  source 1..19: mol_type = other RNA
atgctgagagtgccacata

SEQ ID NO: 2510 - RNA, 19 nt, synthetic construct
  source 1..19: mol_type = other RNA
tgctgagagtgccacatat

SEQ ID NO: 2511 - RNA, 19 nt, synthetic construct
  source 1..19: mol_type = other RNA
gctgagagtgccacatatt

SEQ ID NO: 2512 - RNA, 19 nt, synthetic construct
  source 1..19: mol_type = other RNA
ctgagagtgccacatattg

SEQ ID NO: 2513 - RNA, 19 nt, synthetic construct
  source 1..19: mol_type = other RNA
tgagagtgccacatattgt

SEQ ID NO: 2514 - RNA, 19 nt, synthetic construct
  source 1..19: mol_type = other RNA
gagagtgccacatattgtc

SEQ ID NO: 2515 - RNA, 19 nt, synthetic construct
  source 1..19: mol_type = other RNA
agagtgccacatattgtct

SEQ ID NO: 2516 - RNA, 19 nt, synthetic construct
  source 1..19: mol_type = other RNA
gagtgccacatattgtctt

SEQ ID NO: 2517 - RNA, 19 nt, synthetic construct
  source 1..19: mol_type = other RNA
agtgccacatattgtcttg

SEQ ID NO: 2518 - RNA, 19 nt, synthetic construct
  source 1..19: mol_type = other RNA
gtgccacatattgtcttgt

SEQ ID NO: 2519 - RNA, 19 nt, synthetic construct
  source 1..19: mol_type = other RNA
tgccacatattgtcttgtg

SEQ ID NO: 2520 - RNA, 19 nt, synthetic construct
  source 1..19: mol_type = other RNA
gccacatattgtcttgtga

SEQ ID NO: 2521 - RNA, 19 nt, synthetic construct
  source 1..19: mol_type = other RNA
ccacatattgtcttgtgaa

SEQ ID NO: 2522 - RNA, 19 nt, synthetic construct
  source 1..19: mol_type = other RNA
cacatattgtcttgtgaag

SEQ ID NO: 2523 - RNA, 19 nt, synthetic construct
  source 1..19: mol_type = other RNA
acatattgtcttgtgaaga

SEQ ID NO: 2524 - RNA, 19 nt, synthetic construct
  source 1..19: mol_type = other RNA
catattgtcttgtgaagaa

SEQ ID NO: 2525 - RNA, 19 nt, synthetic construct
  source 1..19: mol_type = other RNA
atattgtcttgtgaagaat

SEQ ID NO: 2526 - RNA, 19 nt, synthetic construct
  source 1..19: mol_type = other RNA
tattgtcttgtgaagaatg

SEQ ID NO: 2527 - RNA, 19 nt, synthetic construct
  source 1..19: mol_type = other RNA
attgtcttgtgaagaatgc

SEQ ID NO: 2528 - RNA, 19 nt, synthetic construct
  source 1..19: mol_type = other RNA
ttgtcttgtgaagaatgct

SEQ ID NO: 2529 - RNA, 19 nt, synthetic construct
  source 1..19: mol_type = other RNA
tgtcttgtgaagaatgctg

SEQ ID NO: 2530 - RNA, 19 nt, synthetic construct
  source 1..19: mol_type = other RNA
gtcttgtgaagaatgctgt

SEQ ID NO: 2531 - RNA, 19 nt, synthetic construct
  source 1..19: mol_type = other RNA
tcttgtgaagaatgctgtg

SEQ ID NO: 2532 - RNA, 19 nt, synthetic construct
  source 1..19: mol_type = other RNA
cttgtgaagaatgctgtga

SEQ ID NO: 2533 - RNA, 19 nt, synthetic construct
  source 1..19: mol_type = other RNA
ttgtgaagaatgctgtgaa

SEQ ID NO: 2534 - RNA, 19 nt, synthetic construct
  source 1..19: mol_type = other RNA
tgtgaagaatgctgtgaaa

SEQ ID NO: 2535 - RNA, 19 nt, synthetic construct
  source 1..19: mol_type = other RNA
gtgaagaatgctgtgaaaa

SEQ ID NO: 2536 - RNA, 19 nt, synthetic construct
  source 1..19: mol_type = other RNA
tgaagaatgctgtgaaaat

SEQ ID NO: 2537 - RNA, 19 nt, synthetic construct
  source 1..19: mol_type = other RNA
gaagaatgctgtgaaaatg

SEQ ID NO: 2538 - RNA, 19 nt, synthetic construct
  source 1..19: mol_type = other RNA
aagaatgctgtgaaaatgt

SEQ ID NO: 2539 - RNA, 19 nt, synthetic construct
  source 1..19: mol_type = other RNA
agaatgctgtgaaaatgtt

SEQ ID NO: 2540 - RNA, 19 nt, synthetic construct
  source 1..19: mol_type = other RNA
gaatgctgtgaaaatgttt

SEQ ID NO: 2541 - RNA, 19 nt, synthetic construct
  source 1..19: mol_type = other RNA
aatgctgtgaaaatgttta

SEQ ID NO: 2542 - RNA, 19 nt, synthetic construct
  source 1..19: mol_type = other RNA
atgctgtgaaaatgtttaa

SEQ ID NO: 2543 - RNA, 19 nt, synthetic construct
  source 1..19: mol_type = other RNA
tgctgtgaaaatgtttaag

SEQ ID NO: 2544 - RNA, 19 nt, synthetic construct
  source 1..19: mol_type = other RNA
gctgtgaaaatgtttaagg

SEQ ID NO: 2545 - RNA, 19 nt, synthetic construct
  source 1..19: mol_type = other RNA
ctgtgaaaatgtttaagga

SEQ ID NO: 2546 - RNA, 19 nt, synthetic construct
  source 1..19: mol_type = other RNA
tgtgaaaatgtttaaggat

SEQ ID NO: 2547 - RNA, 19 nt, synthetic construct
  source 1..19: mol_type = other RNA
gtgaaaatgtttaaggata

SEQ ID NO: 2548 - RNA, 19 nt, synthetic construct
  source 1..19: mol_type = other RNA
tgaaaatgtttaaggatat

SEQ ID NO: 2549 - RNA, 19 nt, synthetic construct
  source 1..19: mol_type = other RNA
gaaaatgtttaaggatatt

SEQ ID NO: 2550 - RNA, 19 nt, synthetic construct
  source 1..19: mol_type = other RNA
aaaatgtttaaggatattg

SEQ ID NO: 2551 - RNA, 19 nt, synthetic construct
  source 1..19: mol_type = other RNA
aaatgtttaaggatattgg

SEQ ID NO: 2552 - RNA, 19 nt, synthetic construct
  source 1..19: mol_type = other RNA
aatgtttaaggatattggg

SEQ ID NO: 2553 - RNA, 19 nt, synthetic construct
  source 1..19: mol_type = other RNA
atgtttaaggatattgggg

SEQ ID NO: 2554 - RNA, 19 nt, synthetic construct
  source 1..19: mol_type = other RNA
tgtttaaggatattggggt

SEQ ID NO: 2555 - RNA, 19 nt, synthetic construct
  source 1..19: mol_type = other RNA
gtttaaggatattggggtt

SEQ ID NO: 2556 - RNA, 19 nt, synthetic construct
  source 1..19: mol_type = other RNA
tttaaggatattggggttt

SEQ ID NO: 2557 - RNA, 19 nt, synthetic construct
  source 1..19: mol_type = other RNA
ttaaggatattggggtttt

SEQ ID NO: 2558 - RNA, 19 nt, synthetic construct
  source 1..19: mol_type = other RNA
taaggatattggggttttc

SEQ ID NO: 2559 - RNA, 19 nt, synthetic construct
  source 1..19: mol_type = other RNA
aaggatattggggttttca

SEQ ID NO: 2560 - RNA, 19 nt, synthetic construct
  source 1..19: mol_type = other RNA
aggatattggggttttcaa

SEQ ID NO: 2561 - RNA, 19 nt, synthetic construct
  source 1..19: mol_type = other RNA
ggatattggggttttcaag

SEQ ID NO: 2562 - RNA, 19 nt, synthetic construct
  source 1..19: mol_type = other RNA
gatattggggttttcaagg

SEQ ID NO: 2563 - RNA, 19 nt, synthetic construct
  source 1..19: mol_type = other RNA
atattggggttttcaagga

SEQ ID NO: 2564 - RNA, 19 nt, synthetic construct
  source 1..19: mol_type = other RNA
tattggggttttcaaggag

SEQ ID NO: 2565 - RNA, 19 nt, synthetic construct
  source 1..19: mol_type = other RNA
attggggttttcaaggaga

SEQ ID NO: 2566 - RNA, 19 nt, synthetic construct
  source 1..19: mol_type = other RNA
ttggggttttcaaggagac

SEQ ID NO: 2567 - RNA, 19 nt, synthetic construct
  source 1..19: mol_type = other RNA
tggggttttcaaggagacc

SEQ ID NO: 2568 - RNA, 19 nt, synthetic construct
  source 1..19: mol_type = other RNA
ggggttttcaaggagacca

SEQ ID NO: 2569 - RNA, 19 nt, synthetic construct
  source 1..19: mol_type = other RNA
gggttttcaaggagaccaa

SEQ ID NO: 2570 - RNA, 19 nt, synthetic construct
  source 1..19: mol_type = other RNA
ggttttcaaggagaccaaa

SEQ ID NO: 2571 - RNA, 19 nt, synthetic construct
  source 1..19: mol_type = other RNA
gttttcaaggagaccaaac

SEQ ID NO: 2572 - RNA, 19 nt, synthetic construct
  source 1..19: mol_type = other RNA
ttttcaaggagaccaaaca

SEQ ID NO: 2573 - RNA, 19 nt, synthetic construct
  source 1..19: mol_type = other RNA
tttcaaggagaccaaacaa

SEQ ID NO: 2574 - RNA, 19 nt, synthetic construct
  source 1..19: mol_type = other RNA
ttcaaggagaccaaacaaa

SEQ ID NO: 2575 - RNA, 19 nt, synthetic construct
  source 1..19: mol_type = other RNA
tcaaggagaccaaacaaaa

SEQ ID NO: 2576 - RNA, 19 nt, synthetic construct
  source 1..19: mol_type = other RNA
caaggagaccaaacaaaag

SEQ ID NO: 2577 - RNA, 19 nt, synthetic construct
  source 1..19: mol_type = other RNA
aaggagaccaaacaaaaga

SEQ ID NO: 2578 - RNA, 19 nt, synthetic construct
  source 1..19: mol_type = other RNA
aggagaccaaacaaaagag

SEQ ID NO: 2579 - RNA, 19 nt, synthetic construct
  source 1..19: mol_type = other RNA
ggagaccaaacaaaagaga

SEQ ID NO: 2580 - RNA, 19 nt, synthetic construct
  source 1..19: mol_type = other RNA
gagaccaaacaaaagagag

SEQ ID NO: 2581 - RNA, 19 nt, synthetic construct
  source 1..19: mol_type = other RNA
agaccaaacaaaagagagt

SEQ ID NO: 2582 - RNA, 19 nt, synthetic construct
  source 1..19: mol_type = other RNA
gaccaaacaaaagagagtg

SEQ ID NO: 2583 - RNA, 19 nt, synthetic construct
  source 1..19: mol_type = other RNA
accaaacaaaagagagtgt

SEQ ID NO: 2584 - RNA, 19 nt, synthetic construct
  source 1..19: mol_type = other RNA
ccaaacaaaagagagtgtc

SEQ ID NO: 2585 - RNA, 19 nt, synthetic construct
  source 1..19: mol_type = other RNA
caaacaaaagagagtgtct

SEQ ID NO: 2586 - RNA, 19 nt, synthetic construct
  source 1..19: mol_type = other RNA
aaacaaaagagagtgtctg

SEQ ID NO: 2587 - RNA, 19 nt, synthetic construct
  source 1..19: mol_type = other RNA
aacaaaagagagtgtctgt

SEQ ID NO: 2588 - RNA, 19 nt, synthetic construct
  source 1..19: mol_type = other RNA
acaaaagagagtgtctgtt

SEQ ID NO: 2589 - RNA, 19 nt, synthetic construct
  source 1..19: mol_type = other RNA
caaaagagagtgtctgttt

SEQ ID NO: 2590 - RNA, 19 nt, synthetic construct
  source 1..19: mol_type = other RNA
aaaagagagtgtctgtttt

SEQ ID NO: 2591 - RNA, 19 nt, synthetic construct
  source 1..19: mol_type = other RNA
aaagagagtgtctgtttta

SEQ ID NO: 2592 - RNA, 19 nt, synthetic construct
  source 1..19: mol_type = other RNA
aagagagtgtctgttttag

SEQ ID NO: 2593 - RNA, 19 nt, synthetic construct
  source 1..19: mol_type = other RNA
agagagtgtctgttttaga

SEQ ID NO: 2594 - RNA, 19 nt, synthetic construct
  source 1..19: mol_type = other RNA
gagagtgtctgttttagaa

SEQ ID NO: 2595 - RNA, 19 nt, synthetic construct
  source 1..19: mol_type = other RNA
agagtgtctgttttagaac

SEQ ID NO: 2596 - RNA, 19 nt, synthetic construct
  source 1..19: mol_type = other RNA
gagtgtctgttttagaact

SEQ ID NO: 2597 - RNA, 19 nt, synthetic construct
  source 1..19: mol_type = other RNA
agtgtctgttttagaactg

SEQ ID NO: 2598 - RNA, 19 nt, synthetic construct
  source 1..19: mol_type = other RNA
gtgtctgttttagaactga

SEQ ID NO: 2599 - RNA, 19 nt, synthetic construct
  source 1..19: mol_type = other RNA
tgtctgttttagaactgag

SEQ ID NO: 2600 - RNA, 19 nt, synthetic construct
  source 1..19: mol_type = other RNA
gtctgttttagaactgagc

SEQ ID NO: 2601 - RNA, 19 nt, synthetic construct
  source 1..19: mol_type = other RNA
tctgttttagaactgagca

SEQ ID NO: 2602 - RNA, 19 nt, synthetic construct
  source 1..19: mol_type = other RNA
ctgttttagaactgagcag

SEQ ID NO: 2603 - RNA, 19 nt, synthetic construct
  source 1..19: mol_type = other RNA
tgttttagaactgagcagc

SEQ ID NO: 2604 - RNA, 19 nt, synthetic construct
  source 1..19: mol_type = other RNA
gttttagaactgagcagca

SEQ ID NO: 2605 - RNA, 19 nt, synthetic construct
  source 1..19: mol_type = other RNA
ttttagaactgagcagcac

SEQ ID NO: 2606 - RNA, 19 nt, synthetic construct
  source 1..19: mol_type = other RNA
tttagaactgagcagcact

SEQ ID NO: 2607 - RNA, 19 nt, synthetic construct
  source 1..19: mol_type = other RNA
ttagaactgagcagcactt

SEQ ID NO: 2608 - RNA, 19 nt, synthetic construct
  source 1..19: mol_type = other RNA
tagaactgagcagcacttt

SEQ ID NO: 2609 - RNA, 19 nt, synthetic construct
  source 1..19: mol_type = other RNA
agaactgagcagcactttt

SEQ ID NO: 2610 - RNA, 19 nt, synthetic construct
  source 1..19: mol_type = other RNA
gaactgagcagcacttttc

SEQ ID NO: 2611 - RNA, 19 nt, synthetic construct
  source 1..19: mol_type = other RNA
aactgagcagcacttttct

SEQ ID NO: 2612 - RNA, 19 nt, synthetic construct
  source 1..19: mol_type = other RNA
actgagcagcacttttcta

SEQ ID NO: 2613 - RNA, 19 nt, synthetic construct
  source 1..19: mol_type = other RNA
ctgagcagcacttttctac

SEQ ID NO: 2614 - RNA, 19 nt, synthetic construct
  source 1..19: mol_type = other RNA
tgagcagcacttttctacc

SEQ ID NO: 2615 - RNA, 19 nt, synthetic construct
  source 1..19: mol_type = other RNA
gagcagcacttttctacct

SEQ ID NO: 2616 - RNA, 19 nt, synthetic construct
  source 1..19: mol_type = other RNA
agcagcacttttctacctc

SEQ ID NO: 2617 - RNA, 19 nt, synthetic construct
  source 1..19: mol_type = other RNA
gcagcacttttctacctca

SEQ ID NO: 2618 - RNA, 19 nt, synthetic construct
  source 1..19: mol_type = other RNA
cagcacttttctacctcaa

SEQ ID NO: 2619 - RNA, 19 nt, synthetic construct
  source 1..19: mol_type = other RNA
agcacttttctacctcaat

SEQ ID NO: 2620 - RNA, 19 nt, synthetic construct
  source 1..19: mol_type = other RNA
gcacttttctacctcaatg

SEQ ID NO: 2621 - RNA, 19 nt, synthetic construct
  source 1..19: mol_type = other RNA
cacttttctacctcaatgc

SEQ ID NO: 2622 - RNA, 19 nt, synthetic construct
  source 1..19: mol_type = other RNA
acttttctacctcaatgca

SEQ ID NO: 2623 - RNA, 19 nt, synthetic construct
  source 1..19: mol_type = other RNA
cttttctacctcaatgcaa

SEQ ID NO: 2624 - RNA, 19 nt, synthetic construct
  source 1..19: mol_type = other RNA
ttttctacctcaatgcaac

SEQ ID NO: 2625 - RNA, 19 nt, synthetic construct
  source 1..19: mol_type = other RNA
tttctacctcaatgcaacc

SEQ ID NO: 2626 - RNA, 19 nt, synthetic construct
  source 1..19: mol_type = other RNA
ttctacctcaatgcaaccg

SEQ ID NO: 2627 - RNA, 19 nt, synthetic construct
  source 1..19: mol_type = other RNA
tctacctcaatgcaaccga

SEQ ID NO: 2628 - RNA, 19 nt, synthetic construct
  source 1..19: mol_type = other RNA
ctacctcaatgcaaccgac

SEQ ID NO: 2629 - RNA, 19 nt, synthetic construct
  source 1..19: mol_type = other RNA
tacctcaatgcaaccgaca

SEQ ID NO: 2630 - RNA, 19 nt, synthetic construct
  source 1..19: mol_type = other RNA
acctcaatgcaaccgacaa

SEQ ID NO: 2631 - RNA, 19 nt, synthetic construct
  source 1..19: mol_type = other RNA
cctcaatgcaaccgacaaa

SEQ ID NO: 2632 - RNA, 19 nt, synthetic construct
  source 1..19: mol_type = other RNA
ctcaatgcaaccgacaaaa

SEQ ID NO: 2633 - RNA, 19 nt, synthetic construct
  source 1..19: mol_type = other RNA
tcaatgcaaccgacaaaaa

SEQ ID NO: 2634 - RNA, 19 nt, synthetic construct
  source 1..19: mol_type = other RNA
caatgcaaccgacaaaaac

SEQ ID NO: 2635 - RNA, 19 nt, synthetic construct
  source 1..19: mol_type = other RNA
aatgcaaccgacaaaaact

SEQ ID NO: 2636 - RNA, 19 nt, synthetic construct
  source 1..19: mol_type = other RNA
atgcaaccgacaaaaactt

SEQ ID NO: 2637 - RNA, 19 nt, synthetic construct
  source 1..19: mol_type = other RNA
tgcaaccgacaaaaacttc

SEQ ID NO: 2638 - RNA, 19 nt, synthetic construct
  source 1..19: mol_type = other RNA
gcaaccgacaaaaacttct

SEQ ID NO: 2639 - RNA, 19 nt, synthetic construct
  source 1..19: mol_type = other RNA
caaccgacaaaaacttcta

SEQ ID NO: 2640 - RNA, 19 nt, synthetic construct
  source 1..19: mol_type = other RNA
aaccgacaaaaacttctag

SEQ ID NO: 2641 - RNA, 19 nt, synthetic construct
  source 1..19: mol_type = other RNA
accgacaaaaacttctaga

SEQ ID NO: 2642 - RNA, 19 nt, synthetic construct
  source 1..19: mol_type = other RNA
ccgacaaaaacttctagaa

SEQ ID NO: 2643 - RNA, 19 nt, synthetic construct
  source 1..19: mol_type = other RNA
cgacaaaaacttctagaat

SEQ ID NO: 2644 - RNA, 19 nt, synthetic construct
  source 1..19: mol_type = other RNA
gacaaaaacttctagaata

SEQ ID NO: 2645 - RNA, 19 nt, synthetic construct
  source 1..19: mol_type = other RNA
acaaaaacttctagaatat

SEQ ID NO: 2646 - RNA, 19 nt, synthetic construct
  source 1..19: mol_type = other RNA
caaaaacttctagaatata

SEQ ID NO: 2647 - RNA, 19 nt, synthetic construct
  source 1..19: mol_type = other RNA
aaaaacttctagaatatat

SEQ ID NO: 2648 - RNA, 19 nt, synthetic construct
  source 1..19: mol_type = other RNA
aaaacttctagaatatatt

SEQ ID NO: 2649 - RNA, 19 nt, synthetic construct
  source 1..19: mol_type = other RNA
aaacttctagaatatattc

SEQ ID NO: 2650 - RNA, 19 nt, synthetic construct
  source 1..19: mol_type = other RNA
aacttctagaatatattct

SEQ ID NO: 2651 - RNA, 19 nt, synthetic construct
  source 1..19: mol_type = other RNA
acttctagaatatattctg

SEQ ID NO: 2652 - RNA, 19 nt, synthetic construct
  source 1..19: mol_type = other RNA
cttctagaatatattctga

SEQ ID NO: 2653 - RNA, 19 nt, synthetic construct
  source 1..19: mol_type = other RNA
ttctagaatatattctgag

SEQ ID NO: 2654 - RNA, 19 nt, synthetic construct
  source 1..19: mol_type = other RNA
tctagaatatattctgagt

SEQ ID NO: 2655 - RNA, 19 nt, synthetic construct
  source 1..19: mol_type = other RNA
ctagaatatattctgagtt

SEQ ID NO: 2656 - RNA, 19 nt, synthetic construct
  source 1..19: mol_type = other RNA
tagaatatattctgagttt

SEQ ID NO: 2657 - RNA, 19 nt, synthetic construct
  source 1..19: mol_type = other RNA
agaatatattctgagtttt

SEQ ID NO: 2658 - RNA, 19 nt, synthetic construct
  source 1..19: mol_type = other RNA
gaatatattctgagttttg

SEQ ID NO: 2659 - RNA, 19 nt, synthetic construct
  source 1..19: mol_type = other RNA
aatatattctgagttttgt

SEQ ID NO: 2660 - RNA, 19 nt, synthetic construct
  source 1..19: mol_type = other RNA
atatattctgagttttgtg

SEQ ID NO: 2661 - RNA, 19 nt, synthetic construct
  source 1..19: mol_type = other RNA
tatattctgagttttgtgg

SEQ ID NO: 2662 - RNA, 19 nt, synthetic construct
  source 1..19: mol_type = other RNA
atattctgagttttgtggt

SEQ ID NO: 2663 - RNA, 19 nt, synthetic construct
  source 1..19: mol_type = other RNA
tattctgagttttgtggtg

SEQ ID NO: 2664 - RNA, 19 nt, synthetic construct
  source 1..19: mol_type = other RNA
attctgagttttgtggtgc

SEQ ID NO: 2665 - RNA, 19 nt, synthetic construct
  source 1..19: mol_type = other RNA
ttctgagttttgtggtgct

SEQ ID NO: 2666 - RNA, 19 nt, synthetic construct
  source 1..19: mol_type = other RNA
tctgagttttgtggtgctg

SEQ ID NO: 2667 - RNA, 19 nt, synthetic construct
  source 1..19: mol_type = other RNA
ctgagttttgtggtgctgt

SEQ ID NO: 2668 - RNA, 19 nt, synthetic construct
  source 1..19: mol_type = other RNA
tgagttttgtggtgctgta

SEQ ID NO: 2669 - RNA, 19 nt, synthetic construct
  source 1..19: mol_type = other RNA
gagttttgtggtgctgtag

SEQ ID NO: 2670 - RNA, 19 nt, synthetic construct
  source 1..19: mol_type = other RNA
agttttgtggtgctgtagg

SEQ ID NO: 2671 - RNA, 19 nt, synthetic construct
  source 1..19: mol_type = other RNA
gttttgtggtgctgtaggt

SEQ ID NO: 2672 - RNA, 19 nt, synthetic construct
  source 1..19: mol_type = other RNA
ttttgtggtgctgtaggta

SEQ ID NO: 2673 - RNA, 19 nt, synthetic construct
  source 1..19: mol_type = other RNA
tttgtggtgctgtaggtaa

SEQ ID NO: 2674 - RNA, 19 nt, synthetic construct
  source 1..19: mol_type = other RNA
ttgtggtgctgtaggtaac

SEQ ID NO: 2675 - RNA, 19 nt, synthetic construct
  source 1..19: mol_type = other RNA
tgtggtgctgtaggtaacg

SEQ ID NO: 2676 - RNA, 19 nt, synthetic construct
  source 1..19: mol_type = other RNA
gtggtgctgtaggtaacgt

SEQ ID NO: 2677 - RNA, 19 nt, synthetic construct
  source 1..19: mol_type = other RNA
tggtgctgtaggtaacgtg

SEQ ID NO: 2678 - RNA, 19 nt, synthetic construct
  source 1..19: mol_type = other RNA
ggtgctgtaggtaacgtgt

SEQ ID NO: 2679 - RNA, 19 nt, synthetic construct
  source 1..19: mol_type = other RNA
gtgctgtaggtaacgtgtg

SEQ ID NO: 2680 - RNA, 19 nt, synthetic construct
  source 1..19: mol_type = other RNA
tgctgtaggtaacgtgtgg

SEQ ID NO: 2681 - RNA, 19 nt, synthetic construct
  source 1..19: mol_type = other RNA
gctgtaggtaacgtgtggc

SEQ ID NO: 2682 - RNA, 19 nt, synthetic construct
  source 1..19: mol_type = other RNA
ctgtaggtaacgtgtggca

SEQ ID NO: 2683 - RNA, 19 nt, synthetic construct
  source 1..19: mol_type = other RNA
tgtaggtaacgtgtggcac

SEQ ID NO: 2684 - RNA, 19 nt, synthetic construct
  source 1..19: mol_type = other RNA
gtaggtaacgtgtggcact

SEQ ID NO: 2685 - RNA, 19 nt, synthetic construct
  source 1..19: mol_type = other RNA
taggtaacgtgtggcactg

SEQ ID NO: 2686 - RNA, 19 nt, synthetic construct
  source 1..19: mol_type = other RNA
aggtaacgtgtggcactgc

SEQ ID NO: 2687 - RNA, 19 nt, synthetic construct
  source 1..19: mol_type = other RNA
ggtaacgtgtggcactgct

SEQ ID NO: 2688 - RNA, 19 nt, synthetic construct
  source 1..19: mol_type = other RNA
gtaacgtgtggcactgctg

SEQ ID NO: 2689 - RNA, 19 nt, synthetic construct
  source 1..19: mol_type = other RNA
taacgtgtggcactgctgg

SEQ ID NO: 2690 - RNA, 19 nt, synthetic construct
  source 1..19: mol_type = other RNA
aacgtgtggcactgctggc

SEQ ID NO: 2691 - RNA, 19 nt, synthetic construct
  source 1..19: mol_type = other RNA
acgtgtggcactgctggca

SEQ ID NO: 2692 - RNA, 19 nt, synthetic construct
  source 1..19: mol_type = other RNA
cgtgtggcactgctggcaa

SEQ ID NO: 2693 - RNA, 19 nt, synthetic construct
  source 1..19: mol_type = other RNA
gtgtggcactgctggcaaa

SEQ ID NO: 2694 - RNA, 19 nt, synthetic construct
  source 1..19: mol_type = other RNA
tgtggcactgctggcaaat

SEQ ID NO: 2695 - RNA, 19 nt, synthetic construct
  source 1..19: mol_type = other RNA
gtggcactgctggcaaatg

SEQ ID NO: 2696 - RNA, 19 nt, synthetic construct
  source 1..19: mol_type = other RNA
tggcactgctggcaaatga

SEQ ID NO: 2697 - RNA, 19 nt, synthetic construct
  source 1..19: mol_type = other RNA
ggcactgctggcaaatgaa

SEQ ID NO: 2698 - RNA, 19 nt, synthetic construct
  source 1..19: mol_type = other RNA
gcactgctggcaaatgaag

SEQ ID NO: 2699 - RNA, 19 nt, synthetic construct
  source 1..19: mol_type = other RNA
cactgctggcaaatgaagg

SEQ ID NO: 2700 - RNA, 19 nt, synthetic construct
  source 1..19: mol_type = other RNA
actgctggcaaatgaaggt

SEQ ID NO: 2701 - RNA, 19 nt, synthetic construct
  source 1..19: mol_type = other RNA
ctgctggcaaatgaaggtc

SEQ ID NO: 2702 - RNA, 19 nt, synthetic construct
  source 1..19: mol_type = other RNA
tgctggcaaatgaaggtca

SEQ ID NO: 2703 - RNA, 19 nt, synthetic construct
  source 1..19: mol_type = other RNA
gctggcaaatgaaggtcat

SEQ ID NO: 2704 - RNA, 19 nt, synthetic construct
  source 1..19: mol_type = other RNA
ctggcaaatgaaggtcatg

SEQ ID NO: 2705 - RNA, 19 nt, synthetic construct
  source 1..19: mol_type = other RNA
tggcaaatgaaggtcatga

SEQ ID NO: 2706 - RNA, 19 nt, synthetic construct
  source 1..19: mol_type = other RNA
ggcaaatgaaggtcatgag

SEQ ID NO: 2707 - RNA, 19 nt, synthetic construct
  source 1..19: mol_type = other RNA
gcaaatgaaggtcatgaga

SEQ ID NO: 2708 - RNA, 19 nt, synthetic construct
  source 1..19: mol_type = other RNA
caaatgaaggtcatgagat

SEQ ID NO: 2709 - RNA, 19 nt, synthetic construct
  source 1..19: mol_type = other RNA
aaatgaaggtcatgagatg

SEQ ID NO: 2710 - RNA, 19 nt, synthetic construct
  source 1..19: mol_type = other RNA
aatgaaggtcatgagatga

SEQ ID NO: 2711 - RNA, 19 nt, synthetic construct
  source 1..19: mol_type = other RNA
atgaaggtcatgagatgag

SEQ ID NO: 2712 - RNA, 19 nt, synthetic construct
  source 1..19: mol_type = other RNA
tgaaggtcatgagatgagt

SEQ ID NO: 2713 - RNA, 19 nt, synthetic construct
  source 1..19: mol_type = other RNA
gaaggtcatgagatgagtt

SEQ ID NO: 2714 - RNA, 19 nt, synthetic construct
  source 1..19: mol_type = other RNA
aaggtcatgagatgagttc

SEQ ID NO: 2715 - RNA, 19 nt, synthetic construct
  source 1..19: mol_type = other RNA
aggtcatgagatgagttcc

SEQ ID NO: 2716 - RNA, 19 nt, synthetic construct
  source 1..19: mol_type = other RNA
ggtcatgagatgagttcct

SEQ ID NO: 2717 - RNA, 19 nt, synthetic construct
  source 1..19: mol_type = other RNA
gtcatgagatgagttcctt

SEQ ID NO: 2718 - RNA, 19 nt, synthetic construct
  source 1..19: mol_type = other RNA
tcatgagatgagttccttg

SEQ ID NO: 2719 - RNA, 19 nt, synthetic construct
  source 1..19: mol_type = other RNA
catgagatgagttccttgt

SEQ ID NO: 2720 - RNA, 19 nt, synthetic construct
  source 1..19: mol_type = other RNA
atgagatgagttccttgta

SEQ ID NO: 2721 - RNA, 19 nt, synthetic construct
  source 1..19: mol_type = other RNA
tgagatgagttccttgtag

SEQ ID NO: 2722 - RNA, 19 nt, synthetic construct
  source 1..19: mol_type = other RNA
gagatgagttccttgtagg

SEQ ID NO: 2723 - RNA, 19 nt, synthetic construct
  source 1..19: mol_type = other RNA
agatgagttccttgtaggt

SEQ ID NO: 2724 - RNA, 19 nt, synthetic construct
  source 1..19: mol_type = other RNA
gatgagttccttgtaggta

SEQ ID NO: 2725 - RNA, 19 nt, synthetic construct
  source 1..19: mol_type = other RNA
atgagttccttgtaggtac

SEQ ID NO: 2726 - RNA, 19 nt, synthetic construct
  source 1..19: mol_type = other RNA
tgagttccttgtaggtacc

SEQ ID NO: 2727 - RNA, 19 nt, synthetic construct
  source 1..19: mol_type = other RNA
gagttccttgtaggtacca

SEQ ID NO: 2728 - RNA, 19 nt, synthetic construct
  source 1..19: mol_type = other RNA
agttccttgtaggtaccag

SEQ ID NO: 2729 - RNA, 19 nt, synthetic construct
  source 1..19: mol_type = other RNA
gttccttgtaggtaccagc

SEQ ID NO: 2730 - RNA, 19 nt, synthetic construct
  source 1..19: mol_type = other RNA
ttccttgtaggtaccagct

SEQ ID NO: 2731 - RNA, 19 nt, synthetic construct
  source 1..19: mol_type = other RNA
tccttgtaggtaccagctt

SEQ ID NO: 2732 - RNA, 19 nt, synthetic construct
  source 1..19: mol_type = other RNA
ccttgtaggtaccagcttc

SEQ ID NO: 2733 - RNA, 19 nt, synthetic construct
  source 1..19: mol_type = other RNA
cttgtaggtaccagcttct

SEQ ID NO: 2734 - RNA, 19 nt, synthetic construct
  source 1..19: mol_type = other RNA
ttgtaggtaccagcttctg

SEQ ID NO: 2735 - RNA, 19 nt, synthetic construct
  source 1..19: mol_type = other RNA
tgtaggtaccagcttctgg

SEQ ID NO: 2736 - RNA, 19 nt, synthetic construct
  source 1..19: mol_type = other RNA
gtaggtaccagcttctggc

SEQ ID NO: 2737 - RNA, 19 nt, synthetic construct
  source 1..19: mol_type = other RNA
taggtaccagcttctggct

SEQ ID NO: 2738 - RNA, 19 nt, synthetic construct
  source 1..19: mol_type = other RNA
aggtaccagcttctggctc

SEQ ID NO: 2739 - RNA, 19 nt, synthetic construct
  source 1..19: mol_type = other RNA
ggtaccagcttctggctca

SEQ ID NO: 2740 - RNA, 19 nt, synthetic construct
  source 1..19: mol_type = other RNA
gtaccagcttctggctcaa

SEQ ID NO: 2741 - RNA, 19 nt, synthetic construct
  source 1..19: mol_type = other RNA
taccagcttctggctcaag

SEQ ID NO: 2742 - RNA, 19 nt, synthetic construct
  source 1..19: mol_type = other RNA
accagcttctggctcaaga

SEQ ID NO: 2743 - RNA, 19 nt, synthetic construct
  source 1..19: mol_type = other RNA
ccagcttctggctcaagag

SEQ ID NO: 2744 - RNA, 19 nt, synthetic construct
  source 1..19: mol_type = other RNA
cagcttctggctcaagagt

SEQ ID NO: 2745 - RNA, 19 nt, synthetic construct
  source 1..19: mol_type = other RNA
agcttctggctcaagagtt

SEQ ID NO: 2746 - RNA, 19 nt, synthetic construct
  source 1..19: mol_type = other RNA
gcttctggctcaagagttg

SEQ ID NO: 2747 - RNA, 19 nt, synthetic construct
  source 1..19: mol_type = other RNA
cttctggctcaagagttga

SEQ ID NO: 2748 - RNA, 19 nt, synthetic construct
  source 1..19: mol_type = other RNA
ttctggctcaagagttgaa

SEQ ID NO: 2749 - RNA, 19 nt, synthetic construct
  source 1..19: mol_type = other RNA
tctggctcaagagttgaag

SEQ ID NO: 2750 - RNA, 19 nt, synthetic construct
  source 1..19: mol_type = other RNA
ctggctcaagagttgaagg

SEQ ID NO: 2751 - RNA, 19 nt, synthetic construct
  source 1..19: mol_type = other RNA
tggctcaagagttgaaggt

SEQ ID NO: 2752 - RNA, 19 nt, synthetic construct
  source 1..19: mol_type = other RNA
ggctcaagagttgaaggtg

SEQ ID NO: 2753 - RNA, 19 nt, synthetic construct
  source 1..19: mol_type = other RNA
gctcaagagttgaaggtgc

SEQ ID NO: 2754 - RNA, 19 nt, synthetic construct
  source 1..19: mol_type = other RNA
ctcaagagttgaaggtgcc

SEQ ID NO: 2755 - RNA, 19 nt, synthetic construct
  source 1..19: mol_type = other RNA
tcaagagttgaaggtgcca

SEQ ID NO: 2756 - RNA, 19 nt, synthetic construct
  source 1..19: mol_type = other RNA
caagagttgaaggtgccat

SEQ ID NO: 2757 - RNA, 19 nt, synthetic construct
  source 1..19: mol_type = other RNA
aagagttgaaggtgccatc

SEQ ID NO: 2758 - RNA, 19 nt, synthetic construct
  source 1..19: mol_type = other RNA
agagttgaaggtgccatcg

SEQ ID NO: 2759 - RNA, 19 nt, synthetic construct
  source 1..19: mol_type = other RNA
gagttgaaggtgccatcgc

SEQ ID NO: 2760 - RNA, 19 nt, synthetic construct
  source 1..19: mol_type = other RNA
agttgaaggtgccatcgca

SEQ ID NO: 2761 - RNA, 19 nt, synthetic construct
  source 1..19: mol_type = other RNA
gttgaaggtgccatcgcag

SEQ ID NO: 2762 - RNA, 19 nt, synthetic construct
  source 1..19: mol_type = other RNA
ttgaaggtgccatcgcagg

SEQ ID NO: 2763 - RNA, 19 nt, synthetic construct
  source 1..19: mol_type = other RNA
tgaaggtgccatcgcaggg

SEQ ID NO: 2764 - RNA, 19 nt, synthetic construct
  source 1..19: mol_type = other RNA
gaaggtgccatcgcagggt

SEQ ID NO: 2765 - RNA, 19 nt, synthetic construct
  source 1..19: mol_type = other RNA
aaggtgccatcgcagggtc

SEQ ID NO: 2766 - RNA, 19 nt, synthetic construct
  source 1..19: mol_type = other RNA
aggtgccatcgcagggtca

SEQ ID NO: 2767 - RNA, 19 nt, synthetic construct
  source 1..19: mol_type = other RNA
ggtgccatcgcagggtcag

SEQ ID NO: 2768 - RNA, 19 nt, synthetic construct
  source 1..19: mol_type = other RNA
gtgccatcgcagggtcagg

SEQ ID NO: 2769 - RNA, 19 nt, synthetic construct
  source 1..19: mol_type = other RNA
tgccatcgcagggtcaggc

SEQ ID NO: 2770 - RNA, 19 nt, synthetic construct
  source 1..19: mol_type = other RNA
gccatcgcagggtcaggcc

SEQ ID NO: 2771 - RNA, 19 nt, synthetic construct
  source 1..19: mol_type = other RNA
ccatcgcagggtcaggcct

SEQ ID NO: 2772 - RNA, 19 nt, synthetic construct
  source 1..19: mol_type = other RNA
catcgcagggtcaggcctg

SEQ ID NO: 2773 - RNA, 19 nt, synthetic construct
  source 1..19: mol_type = other RNA
atcgcagggtcaggcctgc

SEQ ID NO: 2774 - RNA, 19 nt, synthetic construct
  source 1..19: mol_type = other RNA
tcgcagggtcaggcctgcc

SEQ ID NO: 2775 - RNA, 19 nt, synthetic construct
  source 1..19: mol_type = other RNA
cgcagggtcaggcctgccc

SEQ ID NO: 2776 - RNA, 19 nt, synthetic construct
  source 1..19: mol_type = other RNA
gcagggtcaggcctgccct

SEQ ID NO: 2777 - RNA, 19 nt, synthetic construct
  source 1..19: mol_type = other RNA
cagggtcaggcctgccctg

SEQ ID NO: 2778 - RNA, 19 nt, synthetic construct
  source 1..19: mol_type = other RNA
agggtcaggcctgccctgt

SEQ ID NO: 2779 - RNA, 19 nt, synthetic construct
  source 1..19: mol_type = other RNA
gggtcaggcctgccctgtc

SEQ ID NO: 2780 - RNA, 19 nt, synthetic construct
  source 1..19: mol_type = other RNA
ggtcaggcctgccctgtcc

SEQ ID NO: 2781 - RNA, 19 nt, synthetic construct
  source 1..19: mol_type = other RNA
gtcaggcctgccctgtccc

SEQ ID NO: 2782 - RNA, 19 nt, synthetic construct
  source 1..19: mol_type = other RNA
tcaggcctgccctgtcccg

SEQ ID NO: 2783 - RNA, 19 nt, synthetic construct
  source 1..19: mol_type = other RNA
caggcctgccctgtcccga

SEQ ID NO: 2784 - RNA, 19 nt, synthetic construct
  source 1..19: mol_type = other RNA
aggcctgccctgtcccgaa

SEQ ID NO: 2785 - RNA, 19 nt, synthetic construct
  source 1..19: mol_type = other RNA
ggcctgccctgtcccgaag

SEQ ID NO: 2786 - RNA, 19 nt, synthetic construct
  source 1..19: mol_type = other RNA
gcctgccctgtcccgaagt

SEQ ID NO: 2787 - RNA, 19 nt, synthetic construct
  source 1..19: mol_type = other RNA
cctgccctgtcccgaagtg

SEQ ID NO: 2788 - RNA, 19 nt, synthetic construct
  source 1..19: mol_type = other RNA
ctgccctgtcccgaagtga

SEQ ID NO: 2789 - RNA, 19 nt, synthetic construct
  source 1..19: mol_type = other RNA
tgccctgtcccgaagtgat

SEQ ID NO: 2790 - RNA, 19 nt, synthetic construct
  source 1..19: mol_type = other RNA
gccctgtcccgaagtgatc

SEQ ID NO: 2791 - RNA, 19 nt, synthetic construct
  source 1..19: mol_type = other RNA
ccctgtcccgaagtgatct

SEQ ID NO: 2792 - RNA, 19 nt, synthetic construct
  source 1..19: mol_type = other RNA
cctgtcccgaagtgatctc

SEQ ID NO: 2793 - RNA, 19 nt, synthetic construct
  source 1..19: mol_type = other RNA
ctgtcccgaagtgatctcc

SEQ ID NO: 2794 - RNA, 19 nt, synthetic construct
  source 1..19: mol_type = other RNA
tgtcccgaagtgatctcct

SEQ ID NO: 2795 - RNA, 19 nt, synthetic construct
  source 1..19: mol_type = other RNA
gtcccgaagtgatctcctg

SEQ ID NO: 2796 - RNA, 19 nt, synthetic construct
  source 1..19: mol_type = other RNA
tcccgaagtgatctcctgg

SEQ ID NO: 2797 - RNA, 19 nt, synthetic construct
  source 1..19: mol_type = other RNA
cccgaagtgatctcctgga

SEQ ID NO: 2798 - RNA, 19 nt, synthetic construct
  source 1..19: mol_type = other RNA
ccgaagtgatctcctggaa

SEQ ID NO: 2799 - RNA, 19 nt, synthetic construct
  source 1..19: mol_type = other RNA
cgaagtgatctcctggaag

SEQ ID NO: 2800 - RNA, 19 nt, synthetic construct
  source 1..19: mol_type = other RNA
gaagtgatctcctggaaga

SEQ ID NO: 2801 - RNA, 19 nt, synthetic construct
  source 1..19: mol_type = other RNA
aagtgatctcctggaagac

SEQ ID NO: 2802 - RNA, 19 nt, synthetic construct
  source 1..19: mol_type = other RNA
agtgatctcctggaagaca

SEQ ID NO: 2803 - RNA, 19 nt, synthetic construct
  source 1..19: mol_type = other RNA
gtgatctcctggaagacaa

SEQ ID NO: 2804 - RNA, 19 nt, synthetic construct
  source 1..19: mol_type = other RNA
tgatctcctggaagacaag

SEQ ID NO: 2805 - RNA, 19 nt, synthetic construct
  source 1..19: mol_type = other RNA
gatctcctggaagacaagt

SEQ ID NO: 2806 - RNA, 19 nt, synthetic construct
  source 1..19: mol_type = other RNA
atctcctggaagacaagtg

SEQ ID NO: 2807 - RNA, 19 nt, synthetic construct
  source 1..19: mol_type = other RNA
tctcctggaagacaagtgc

SEQ ID NO: 2808 - RNA, 19 nt, synthetic construct
  source 1..19: mol_type = other RNA
ctcctggaagacaagtgcc

SEQ ID NO: 2809 - RNA, 19 nt, synthetic construct
  source 1..19: mol_type = other RNA
tcctggaagacaagtgcct

SEQ ID NO: 2810 - RNA, 19 nt, synthetic construct
  source 1..19: mol_type = other RNA
cctggaagacaagtgcctt

SEQ ID NO: 2811 - RNA, 19 nt, synthetic construct
  source 1..19: mol_type = other RNA
ctggaagacaagtgccttc

SEQ ID NO: 2812 - RNA, 19 nt, synthetic construct
  source 1..19: mol_type = other RNA
tggaagacaagtgccttct

SEQ ID NO: 2813 - RNA, 19 nt, synthetic construct
  source 1..19: mol_type = other RNA
ggaagacaagtgccttctc

SEQ ID NO: 2814 - RNA, 19 nt, synthetic construct
  source 1..19: mol_type = other RNA
gaagacaagtgccttctcc

SEQ ID NO: 2815 - RNA, 19 nt, synthetic construct
  source 1..19: mol_type = other RNA
aagacaagtgccttctccc

SEQ ID NO: 2816 - RNA, 19 nt, synthetic construct
  source 1..19: mol_type = other RNA
agacaagtgccttctccct

SEQ ID NO: 2817 - RNA, 19 nt, synthetic construct
  source 1..19: mol_type = other RNA
gacaagtgccttctccctc

SEQ ID NO: 2818 - RNA, 19 nt, synthetic construct
  source 1..19: mol_type = other RNA
acaagtgccttctccctcc

SEQ ID NO: 2819 - RNA, 19 nt, synthetic construct
  source 1..19: mol_type = other RNA
caagtgccttctccctcca

SEQ ID NO: 2820 - RNA, 19 nt, synthetic construct
  source 1..19: mol_type = other RNA
aagtgccttctccctccat

SEQ ID NO: 2821 - RNA, 19 nt, synthetic construct
  source 1..19: mol_type = other RNA
agtgccttctccctccatg

SEQ ID NO: 2822 - RNA, 19 nt, synthetic construct
  source 1..19: mol_type = other RNA
gtgccttctccctccatgg

SEQ ID NO: 2823 - RNA, 19 nt, synthetic construct
  source 1..19: mol_type = other RNA
tgccttctccctccatgga

SEQ ID NO: 2824 - RNA, 19 nt, synthetic construct
  source 1..19: mol_type = other RNA
gccttctccctccatggat

SEQ ID NO: 2825 - RNA, 19 nt, synthetic construct
  source 1..19: mol_type = other RNA
ccttctccctccatggatc

SEQ ID NO: 2826 - RNA, 19 nt, synthetic construct
  source 1..19: mol_type = other RNA
cttctccctccatggatct

SEQ ID NO: 2827 - RNA, 19 nt, synthetic construct
  source 1..19: mol_type = other RNA
ttctccctccatggatctg

SEQ ID NO: 2828 - RNA, 19 nt, synthetic construct
  source 1..19: mol_type = other RNA
tctccctccatggatctgt

SEQ ID NO: 2829 - RNA, 19 nt, synthetic construct
  source 1..19: mol_type = other RNA
ctccctccatggatctgtg

SEQ ID NO: 2830 - RNA, 19 nt, synthetic construct
  source 1..19: mol_type = other RNA
tccctccatggatctgtga

SEQ ID NO: 2831 - RNA, 19 nt, synthetic construct
  source 1..19: mol_type = other RNA
ccctccatggatctgtgat

SEQ ID NO: 2832 - RNA, 19 nt, synthetic construct
  source 1..19: mol_type = other RNA
cctccatggatctgtgatc

SEQ ID NO: 2833 - RNA, 19 nt, synthetic construct
  source 1..19: mol_type = other RNA
ctccatggatctgtgatct

SEQ ID NO: 2834 - RNA, 19 nt, synthetic construct
  source 1..19: mol_type = other RNA
tccatggatctgtgatctt

SEQ ID NO: 2835 - RNA, 19 nt, synthetic construct
  source 1..19: mol_type = other RNA
ccatggatctgtgatcttc

SEQ ID NO: 2836 - RNA, 19 nt, synthetic construct
  source 1..19: mol_type = other RNA
catggatctgtgatcttcc

SEQ ID NO: 2837 - RNA, 19 nt, synthetic construct
  source 1..19: mol_type = other RNA
atggatctgtgatcttccc

SEQ ID NO: 2838 - RNA, 19 nt, synthetic construct
  source 1..19: mol_type = other RNA
tggatctgtgatcttccca

SEQ ID NO: 2839 - RNA, 19 nt, synthetic construct
  source 1..19: mol_type = other RNA
ggatctgtgatcttcccag

SEQ ID NO: 2840 - RNA, 19 nt, synthetic construct
  source 1..19: mol_type = other RNA
gatctgtgatcttcccagc

SEQ ID NO: 2841 - RNA, 19 nt, synthetic construct
  source 1..19: mol_type = other RNA
atctgtgatcttcccagct

SEQ ID NO: 2842 - RNA, 19 nt, synthetic construct
  source 1..19: mol_type = other RNA
tctgtgatcttcccagctc

SEQ ID NO: 2843 - RNA, 19 nt, synthetic construct
  source 1..19: mol_type = other RNA
ctgtgatcttcccagctct

SEQ ID NO: 2844 - RNA, 19 nt, synthetic construct
  source 1..19: mol_type = other RNA
tgtgatcttcccagctctg

SEQ ID NO: 2845 - RNA, 19 nt, synthetic construct
  source 1..19: mol_type = other RNA
gtgatcttcccagctctgc

SEQ ID NO: 2846 - RNA, 19 nt, synthetic construct
  source 1..19: mol_type = other RNA
tgatcttcccagctctgca

SEQ ID NO: 2847 - RNA, 19 nt, synthetic construct
  source 1..19: mol_type = other RNA
gatcttcccagctctgcat

SEQ ID NO: 2848 - RNA, 19 nt, synthetic construct
  source 1..19: mol_type = other RNA
atcttcccagctctgcatc

SEQ ID NO: 2849 - RNA, 19 nt, synthetic construct
  source 1..19: mol_type = other RNA
tcttcccagctctgcatca

SEQ ID NO: 2850 - RNA, 19 nt, synthetic construct
  source 1..19: mol_type = other RNA
cttcccagctctgcatcaa

SEQ ID NO: 2851 - RNA, 19 nt, synthetic construct
  source 1..19: mol_type = other RNA
ttcccagctctgcatcaac

SEQ ID NO: 2852 - RNA, 19 nt, synthetic construct
  source 1..19: mol_type = other RNA
tcccagctctgcatcaaca

SEQ ID NO: 2853 - RNA, 19 nt, synthetic construct
  source 1..19: mol_type = other RNA
cccagctctgcatcaacac

SEQ ID NO: 2854 - RNA, 19 nt, synthetic construct
  source 1..19: mol_type = other RNA
ccagctctgcatcaacaca

SEQ ID NO: 2855 - RNA, 19 nt, synthetic construct
  source 1..19: mol_type = other RNA
cagctctgcatcaacacag

SEQ ID NO: 2856 - RNA, 19 nt, synthetic construct
  source 1..19: mol_type = other RNA
agctctgcatcaacacagc

SEQ ID NO: 2857 - RNA, 19 nt, synthetic construct
  source 1..19: mol_type = other RNA
gctctgcatcaacacagca

SEQ ID NO: 2858 - RNA, 19 nt, synthetic construct
  source 1..19: mol_type = other RNA
ctctgcatcaacacagcag

SEQ ID NO: 2859 - RNA, 19 nt, synthetic construct
  source 1..19: mol_type = other RNA
tctgcatcaacacagcagc

SEQ ID NO: 2860 - RNA, 19 nt, synthetic construct
  source 1..19: mol_type = other RNA
ctgcatcaacacagcagcc

SEQ ID NO: 2861 - RNA, 19 nt, synthetic construct
  source 1..19: mol_type = other RNA
tgcatcaacacagcagcct

SEQ ID NO: 2862 - RNA, 19 nt, synthetic construct
  source 1..19: mol_type = other RNA
gcatcaacacagcagcctg

SEQ ID NO: 2863 - RNA, 19 nt, synthetic construct
  source 1..19: mol_type = other RNA
catcaacacagcagcctgc

SEQ ID NO: 2864 - RNA, 19 nt, synthetic construct
  source 1..19: mol_type = other RNA
atcaacacagcagcctgca

SEQ ID NO: 2865 - RNA, 19 nt, synthetic construct
  source 1..19: mol_type = other RNA
tcaacacagcagcctgcag

SEQ ID NO: 2866 - RNA, 19 nt, synthetic construct
  source 1..19: mol_type = other RNA
caacacagcagcctgcaga

SEQ ID NO: 2867 - RNA, 19 nt, synthetic construct
  source 1..19: mol_type = other RNA
aacacagcagcctgcagat

SEQ ID NO: 2868 - RNA, 19 nt, synthetic construct
  source 1..19: mol_type = other RNA
acacagcagcctgcagata

SEQ ID NO: 2869 - RNA, 19 nt, synthetic construct
  source 1..19: mol_type = other RNA
cacagcagcctgcagataa

SEQ ID NO: 2870 - RNA, 19 nt, synthetic construct
  source 1..19: mol_type = other RNA
acagcagcctgcagataac

SEQ ID NO: 2871 - RNA, 19 nt, synthetic construct
  source 1..19: mol_type = other RNA
cagcagcctgcagataaca

SEQ ID NO: 2872 - RNA, 19 nt, synthetic construct
  source 1..19: mol_type = other RNA
agcagcctgcagataacac

SEQ ID NO: 2873 - RNA, 19 nt, synthetic construct
  source 1..19: mol_type = other RNA
gcagcctgcagataacact

SEQ ID NO: 2874 - RNA, 19 nt, synthetic construct
  source 1..19: mol_type = other RNA
cagcctgcagataacactt

SEQ ID NO: 2875 - RNA, 19 nt, synthetic construct
  source 1..19: mol_type = other RNA
agcctgcagataacacttg

SEQ ID NO: 2876 - RNA, 19 nt, synthetic construct
  source 1..19: mol_type = other RNA
gcctgcagataacacttgg

SEQ ID NO: 2877 - RNA, 19 nt, synthetic construct
  source 1..19: mol_type = other RNA
cctgcagataacacttggg

SEQ ID NO: 2878 - RNA, 19 nt, synthetic construct
  source 1..19: mol_type = other RNA
ctgcagataacacttgggg

SEQ ID NO: 2879 - RNA, 19 nt, synthetic construct
  source 1..19: mol_type = other RNA
tgcagataacacttggggg

SEQ ID NO: 2880 - RNA, 19 nt, synthetic construct
  source 1..19: mol_type = other RNA
gcagataacacttgggggg

SEQ ID NO: 2881 - RNA, 19 nt, synthetic construct
  source 1..19: mol_type = other RNA
cagataacacttgggggga

SEQ ID NO: 2882 - RNA, 19 nt, synthetic construct
  source 1..19: mol_type = other RNA
agataacacttggggggac

SEQ ID NO: 2883 - RNA, 19 nt, synthetic construct
  source 1..19: mol_type = other RNA
gataacacttggggggacc

SEQ ID NO: 2884 - RNA, 19 nt, synthetic construct
  source 1..19: mol_type = other RNA
ataacacttggggggacct

SEQ ID NO: 2885 - RNA, 19 nt, synthetic construct
  source 1..19: mol_type = other RNA
taacacttggggggacctc

SEQ ID NO: 2886 - RNA, 19 nt, synthetic construct
  source 1..19: mol_type = other RNA
aacacttggggggacctca

SEQ ID NO: 2887 - RNA, 19 nt, synthetic construct
  source 1..19: mol_type = other RNA
acacttggggggacctcag

SEQ ID NO: 2888 - RNA, 19 nt, synthetic construct
  source 1..19: mol_type = other RNA
cacttggggggacctcagc

SEQ ID NO: 2889 - RNA, 19 nt, synthetic construct
  source 1..19: mol_type = other RNA
acttggggggacctcagcc

SEQ ID NO: 2890 - RNA, 19 nt, synthetic construct
  source 1..19: mol_type = other RNA
cttggggggacctcagcct

SEQ ID NO: 2891 - RNA, 19 nt, synthetic construct
  source 1..19: mol_type = other RNA
ttggggggacctcagcctc

SEQ ID NO: 2892 - RNA, 19 nt, synthetic construct
  source 1..19: mol_type = other RNA
tggggggacctcagcctct

SEQ ID NO: 2893 - RNA, 19 nt, synthetic construct
  source 1..19: mol_type = other RNA
ggggggacctcagcctcta

SEQ ID NO: 2894 - RNA, 19 nt, synthetic construct
  source 1..19: mol_type = other RNA
gggggacctcagcctctat

SEQ ID NO: 2895 - RNA, 19 nt, synthetic construct
  source 1..19: mol_type = other RNA
ggggacctcagcctctatt

SEQ ID NO: 2896 - RNA, 19 nt, synthetic construct
  source 1..19: mol_type = other RNA
gggacctcagcctctattc

SEQ ID NO: 2897 - RNA, 19 nt, synthetic construct
  source 1..19: mol_type = other RNA
ggacctcagcctctattcg

SEQ ID NO: 2898 - RNA, 19 nt, synthetic construct
  source 1..19: mol_type = other RNA
gacctcagcctctattcgc

SEQ ID NO: 2899 - RNA, 19 nt, synthetic construct
  source 1..19: mol_type = other RNA
acctcagcctctattcgca

SEQ ID NO: 2900 - RNA, 19 nt, synthetic construct
  source 1..19: mol_type = other RNA
cctcagcctctattcgcaa

SEQ ID NO: 2901 - RNA, 19 nt, synthetic construct
  source 1..19: mol_type = other RNA
ctcagcctctattcgcaac

SEQ ID NO: 2902 - RNA, 19 nt, synthetic construct
  source 1..19: mol_type = other RNA
tcagcctctattcgcaact

SEQ ID NO: 2903 - RNA, 19 nt, synthetic construct
  source 1..19: mol_type = other RNA
cagcctctattcgcaactc

SEQ ID NO: 2904 - RNA, 19 nt, synthetic construct
  source 1..19: mol_type = other RNA
agcctctattcgcaactca

SEQ ID NO: 2905 - RNA, 19 nt, synthetic construct
  source 1..19: mol_type = other RNA
gcctctattcgcaactcat

SEQ ID NO: 2906 - RNA, 19 nt, synthetic construct
  source 1..19: mol_type = other RNA
cctctattcgcaactcata

SEQ ID NO: 2907 - RNA, 19 nt, synthetic construct
  source 1..19: mol_type = other RNA
ctctattcgcaactcataa

SEQ ID NO: 2908 - RNA, 19 nt, synthetic construct
  source 1..19: mol_type = other RNA
tctattcgcaactcataat

SEQ ID NO: 2909 - RNA, 19 nt, synthetic construct
  source 1..19: mol_type = other RNA
ctattcgcaactcataatc

SEQ ID NO: 2910 - RNA, 19 nt, synthetic construct
  source 1..19: mol_type = other RNA
tattcgcaactcataatcc

SEQ ID NO: 2911 - RNA, 19 nt, synthetic construct
  source 1..19: mol_type = other RNA
attcgcaactcataatccg

SEQ ID NO: 2912 - RNA, 19 nt, synthetic construct
  source 1..19: mol_type = other RNA
ttcgcaactcataatccgt

SEQ ID NO: 2913 - RNA, 19 nt, synthetic construct
  source 1..19: mol_type = other RNA
tcgcaactcataatccgta

SEQ ID NO: 2914 - RNA, 19 nt, synthetic construct
  source 1..19: mol_type = other RNA
cgcaactcataatccgtag

SEQ ID NO: 2915 - RNA, 19 nt, synthetic construct
  source 1..19: mol_type = other RNA
gcaactcataatccgtaga

SEQ ID NO: 2916 - RNA, 19 nt, synthetic construct
  source 1..19: mol_type = other RNA
caactcataatccgtagac

SEQ ID NO: 2917 - RNA, 19 nt, synthetic construct
  source 1..19: mol_type = other RNA
aactcataatccgtagact

SEQ ID NO: 2918 - RNA, 19 nt, synthetic construct
  source 1..19: mol_type = other RNA
actcataatccgtagacta

SEQ ID NO: 2919 - RNA, 19 nt, synthetic construct
  source 1..19: mol_type = other RNA
ctcataatccgtagactac

SEQ ID NO: 2920 - RNA, 19 nt, synthetic construct
  source 1..19: mol_type = other RNA
tcataatccgtagactaca

SEQ ID NO: 2921 - RNA, 19 nt, synthetic construct
  source 1..19: mol_type = other RNA
cataatccgtagactacaa

SEQ ID NO: 2922 - RNA, 19 nt, synthetic construct
  source 1..19: mol_type = other RNA
ataatccgtagactacaag

SEQ ID NO: 2923 - RNA, 19 nt, synthetic construct
  source 1..19: mol_type = other RNA
taatccgtagactacaaga

SEQ ID NO: 2924 - RNA, 19 nt, synthetic construct
  source 1..19: mol_type = other RNA
aatccgtagactacaagat

SEQ ID NO: 2925 - RNA, 19 nt, synthetic construct
  source 1..19: mol_type = other RNA
atccgtagactacaagatg

SEQ ID NO: 2926 - RNA, 19 nt, synthetic construct
  source 1..19: mol_type = other RNA
tccgtagactacaagatga

SEQ ID NO: 2927 - RNA, 19 nt, synthetic construct
  source 1..19: mol_type = other RNA
ccgtagactacaagatgaa

SEQ ID NO: 2928 - RNA, 19 nt, synthetic construct
  source 1..19: mol_type = other RNA
cgtagactacaagatgaaa

SEQ ID NO: 2929 - RNA, 19 nt, synthetic construct
  source 1..19: mol_type = other RNA
gtagactacaagatgaaat

SEQ ID NO: 2930 - RNA, 19 nt, synthetic construct
  source 1..19: mol_type = other RNA
tagactacaagatgaaatc

SEQ ID NO: 2931 - RNA, 19 nt, synthetic construct
  source 1..19: mol_type = other RNA
agactacaagatgaaatct

SEQ ID NO: 2932 - RNA, 19 nt, synthetic construct
  source 1..19: mol_type = other RNA
gactacaagatgaaatctc

SEQ ID NO: 2933 - RNA, 19 nt, synthetic construct
  source 1..19: mol_type = other RNA
actacaagatgaaatctca

SEQ ID NO: 2934 - RNA, 19 nt, synthetic construct
  source 1..19: mol_type = other RNA
ctacaagatgaaatctcaa

SEQ ID NO: 2935 - RNA, 19 nt, synthetic construct
  source 1..19: mol_type = other RNA
tacaagatgaaatctcaat

SEQ ID NO: 2936 - RNA, 19 nt, synthetic construct
  source 1..19: mol_type = other RNA
acaagatgaaatctcaata

SEQ ID NO: 2937 - RNA, 19 nt, synthetic construct
  source 1..19: mol_type = other RNA
caagatgaaatctcaataa

SEQ ID NO: 2938 - RNA, 19 nt, synthetic construct
  source 1..19: mol_type = other RNA
aagatgaaatctcaataaa

SEQ ID NO: 2939 - RNA, 19 nt, synthetic construct
  source 1..19: mol_type = other RNA
agatgaaatctcaataaat

SEQ ID NO: 2940 - RNA, 19 nt, synthetic construct
  source 1..19: mol_type = other RNA
gatgaaatctcaataaatt

SEQ ID NO: 2941 - RNA, 19 nt, synthetic construct
  source 1..19: mol_type = other RNA
atgaaatctcaataaatta

SEQ ID NO: 2942 - RNA, 19 nt, synthetic construct
  source 1..19: mol_type = other RNA
tgaaatctcaataaattat

SEQ ID NO: 2943 - RNA, 19 nt, synthetic construct
  source 1..19: mol_type = other RNA
gaaatctcaataaattatt

SEQ ID NO: 2944 - RNA, 19 nt, synthetic construct
  source 1..19: mol_type = other RNA
aaatctcaataaattattt

SEQ ID NO: 2945 - RNA, 19 nt, synthetic construct
  source 1..19: mol_type = other RNA
aatctcaataaattatttt

SEQ ID NO: 2946 - RNA, 19 nt, synthetic construct
  source 1..19: mol_type = other RNA
atctcaataaattattttt

SEQ ID NO: 2947 - RNA, 19 nt, synthetic construct
  source 1..19: mol_type = other RNA
tctcaataaattatttttg

SEQ ID NO: 2948 - RNA, 19 nt, synthetic construct
  source 1..19: mol_type = other RNA
ctcaataaattatttttga

SEQ ID NO: 2949 - RNA, 19 nt, synthetic construct
  source 1..19: mol_type = other RNA
tcaataaattatttttgag

SEQ ID NO: 2950 - RNA, 19 nt, synthetic construct
  source 1..19: mol_type = other RNA
caataaattatttttgagt

SEQ ID NO: 2951 - RNA, 19 nt, synthetic construct
  source 1..19: mol_type = other RNA
aataaattatttttgagtt

SEQ ID NO: 2952 - RNA, 19 nt, synthetic construct
  source 1..19: mol_type = other RNA
ataaattatttttgagttt

SEQ ID NO: 2953 - RNA, 19 nt, synthetic construct
  source 1..19: mol_type = other RNA
taaattatttttgagttta

SEQ ID NO: 2954 - RNA, 19 nt, synthetic construct
  source 1..19: mol_type = other RNA
aaattatttttgagtttat

SEQ ID NO: 2955 - RNA, 19 nt, synthetic construct
  source 1..19: mol_type = other RNA
aattatttttgagtttatt

SEQ ID NO: 2956 - RNA, 19 nt, synthetic construct
  source 1..19: mol_type = other RNA
attatttttgagtttatta

SEQ ID NO: 2957 - RNA, 19 nt, synthetic construct
  source 1..19: mol_type = other RNA
ttatttttgagtttattaa

SEQ ID NO: 2958 - RNA, 19 nt, synthetic construct
  source 1..19: mol_type = other RNA
tatttttgagtttattaaa

SEQ ID NO: 2959 - RNA, 19 nt, synthetic construct
  source 1..19: mol_type = other RNA
atttttgagtttattaaag

SEQ ID NO: 2960 - RNA, 19 nt, synthetic construct
  source 1..19: mol_type = other RNA
tttttgagtttattaaaga

SEQ ID NO: 2961 - RNA, 19 nt, synthetic construct
  source 1..19: mol_type = other RNA
ttttgagtttattaaagat

SEQ ID NO: 2962 - RNA, 19 nt, synthetic construct
  source 1..19: mol_type = other RNA
tttgagtttattaaagatt

SEQ ID NO: 2963 - RNA, 19 nt, synthetic construct
  source 1..19: mol_type = other RNA
ttgagtttattaaagattg

SEQ ID NO: 2964 - RNA, 19 nt, synthetic construct
  source 1..19: mol_type = other RNA
tgagtttattaaagattga

SEQ ID NO: 2965 - RNA, 19 nt, synthetic construct
  source 1..19: mol_type = other RNA
gagtttattaaagattgac

SEQ ID NO: 2966 - RNA, 19 nt, synthetic construct
  source 1..19: mol_type = other RNA
agtttattaaagattgaca

SEQ ID NO: 2967 - RNA, 19 nt, synthetic construct
  source 1..19: mol_type = other RNA
gtttattaaagattgacat

SEQ ID NO: 2968 - RNA, 19 nt, synthetic construct
  source 1..19: mol_type = other RNA
tttattaaagattgacatt

SEQ ID NO: 2969 - RNA, 19 nt, synthetic construct
  source 1..19: mol_type = other RNA
ttattaaagattgacattt

SEQ ID NO: 2970 - RNA, 19 nt, synthetic construct
  source 1..19: mol_type = other RNA
tattaaagattgacatttt

SEQ ID NO: 2971 - RNA, 19 nt, synthetic construct
  source 1..19: mol_type = other RNA
attaaagattgacatttta

SEQ ID NO: 2972 - RNA, 19 nt, synthetic construct
  source 1..19: mol_type = other RNA
ttaaagattgacattttaa

SEQ ID NO: 2973 - RNA, 19 nt, synthetic construct
  source 1..19: mol_type = other RNA
taaagattgacattttaag

SEQ ID NO: 2974 - RNA, 19 nt, synthetic construct
  source 1..19: mol_type = other RNA
aaagattgacattttaagt

SEQ ID NO: 2975 - RNA, 19 nt, synthetic construct
  source 1..19: mol_type = other RNA
aagattgacattttaagta

SEQ ID NO: 2976 - RNA, 19 nt, synthetic construct
  source 1..19: mol_type = other RNA
agattgacattttaagtac

SEQ ID NO: 2977 - RNA, 19 nt, synthetic construct
  source 1..19: mol_type = other RNA
gattgacattttaagtaca

SEQ ID NO: 2978 - RNA, 19 nt, synthetic construct
  source 1..19: mol_type = other RNA
attgacattttaagtacaa

SEQ ID NO: 2979 - RNA, 19 nt, synthetic construct
  source 1..19: mol_type = other RNA
ttgacattttaagtacaac

SEQ ID NO: 2980 - RNA, 19 nt, synthetic construct
  source 1..19: mol_type = other RNA
tgacattttaagtacaact

SEQ ID NO: 2981 - RNA, 19 nt, synthetic construct
  source 1..19: mol_type = other RNA
gacattttaagtacaactt

SEQ ID NO: 2982 - RNA, 19 nt, synthetic construct
  source 1..19: mol_type = other RNA
acattttaagtacaacttt

SEQ ID NO: 2983 - RNA, 19 nt, synthetic construct
  source 1..19: mol_type = other RNA
cattttaagtacaactttt

SEQ ID NO: 2984 - RNA, 19 nt, synthetic construct
  source 1..19: mol_type = other RNA
attttaagtacaactttta

SEQ ID NO: 2985 - RNA, 19 nt, synthetic construct
  source 1..19: mol_type = other RNA
ttttaagtacaacttttaa

SEQ ID NO: 2986 - RNA, 19 nt, synthetic construct
  source 1..19: mol_type = other RNA
tttaagtacaacttttaag

SEQ ID NO: 2987 - RNA, 19 nt, synthetic construct
  source 1..19: mol_type = other RNA
ttaagtacaacttttaagg

SEQ ID NO: 2988 - RNA, 19 nt, synthetic construct
  source 1..19: mol_type = other RNA
taagtacaacttttaagga

SEQ ID NO: 2989 - RNA, 19 nt, synthetic construct
  source 1..19: mol_type = other RNA
aagtacaacttttaaggac

SEQ ID NO: 2990 - RNA, 19 nt, synthetic construct
  source 1..19: mol_type = other RNA
agtacaacttttaaggact

SEQ ID NO: 2991 - RNA, 19 nt, synthetic construct
  source 1..19: mol_type = other RNA
gtacaacttttaaggacta

SEQ ID NO: 2992 - RNA, 19 nt, synthetic construct
  source 1..19: mol_type = other RNA
tacaacttttaaggactaa

SEQ ID NO: 2993 - RNA, 19 nt, synthetic construct
  source 1..19: mol_type = other RNA
acaacttttaaggactaat

SEQ ID NO: 2994 - RNA, 19 nt, synthetic construct
  source 1..19: mol_type = other RNA
caacttttaaggactaatt

SEQ ID NO: 2995 - RNA, 19 nt, synthetic construct
  source 1..19: mol_type = other RNA
aacttttaaggactaatta

SEQ ID NO: 2996 - RNA, 19 nt, synthetic construct
  source 1..19: mol_type = other RNA
acttttaaggactaattac

SEQ ID NO: 2997 - RNA, 19 nt, synthetic construct
  source 1..19: mol_type = other RNA
cttttaaggactaattact

SEQ ID NO: 2998 - RNA, 19 nt, synthetic construct
  source 1..19: mol_type = other RNA
ttttaaggactaattactg

SEQ ID NO: 2999 - RNA, 19 nt, synthetic construct
  source 1..19: mol_type = other RNA
tttaaggactaattactgt

SEQ ID NO: 3000 - RNA, 19 nt, synthetic construct
  source 1..19: mol_type = other RNA
ttaaggactaattactgtg

SEQ ID NO: 3001 - RNA, 19 nt, synthetic construct
  source 1..19: mol_type = other RNA
taaggactaattactgtga

SEQ ID NO: 3002 - RNA, 19 nt, synthetic construct
  source 1..19: mol_type = other RNA
aaggactaattactgtgat

SEQ ID NO: 3003 - RNA, 19 nt, synthetic construct
  source 1..19: mol_type = other RNA
aggactaattactgtgatg

SEQ ID NO: 3004 - RNA, 19 nt, synthetic construct
  source 1..19: mol_type = other RNA
ggactaattactgtgatgg

SEQ ID NO: 3005 - RNA, 19 nt, synthetic construct
  source 1..19: mol_type = other RNA
gactaattactgtgatgga

SEQ ID NO: 3006 - RNA, 19 nt, synthetic construct
  source 1..19: mol_type = other RNA
actaattactgtgatggac

SEQ ID NO: 3007 - RNA, 19 nt, synthetic construct
  source 1..19: mol_type = other RNA
ctaattactgtgatggaca

SEQ ID NO: 3008 - RNA, 19 nt, synthetic construct
  source 1..19: mol_type = other RNA
taattactgtgatggacac

SEQ ID NO: 3009 - RNA, 19 nt, synthetic construct
  source 1..19: mol_type = other RNA
aattactgtgatggacaca

SEQ ID NO: 3010 - RNA, 19 nt, synthetic construct
  source 1..19: mol_type = other RNA
attactgtgatggacacag

SEQ ID NO: 3011 - RNA, 19 nt, synthetic construct
  source 1..19: mol_type = other RNA
ttactgtgatggacacaga

SEQ ID NO: 3012 - RNA, 19 nt, synthetic construct
  source 1..19: mol_type = other RNA
tactgtgatggacacagaa

SEQ ID NO: 3013 - RNA, 19 nt, synthetic construct
  source 1..19: mol_type = other RNA
actgtgatggacacagaaa

SEQ ID NO: 3014 - RNA, 19 nt, synthetic construct
  source 1..19: mol_type = other RNA
ctgtgatggacacagaaat

SEQ ID NO: 3015 - RNA, 19 nt, synthetic construct
  source 1..19: mol_type = other RNA
tgtgatggacacagaaatg

SEQ ID NO: 3016 - RNA, 19 nt, synthetic construct
  source 1..19: mol_type = other RNA
gtgatggacacagaaatgt

SEQ ID NO: 3017 - RNA, 19 nt, synthetic construct
  source 1..19: mol_type = other RNA
tgatggacacagaaatgta

SEQ ID NO: 3018 - RNA, 19 nt, synthetic construct
  source 1..19: mol_type = other RNA
gatggacacagaaatgtag

SEQ ID NO: 3019 - RNA, 19 nt, synthetic construct
  source 1..19: mol_type = other RNA
atggacacagaaatgtagc

SEQ ID NO: 3020 - RNA, 19 nt, synthetic construct
  source 1..19: mol_type = other RNA
tggacacagaaatgtagct

SEQ ID NO: 3021 - RNA, 19 nt, synthetic construct
  source 1..19: mol_type = other RNA
ggacacagaaatgtagctg

SEQ ID NO: 3022 - RNA, 19 nt, synthetic construct
  source 1..19: mol_type = other RNA
gacacagaaatgtagctgt

SEQ ID NO: 3023 - RNA, 19 nt, synthetic construct
  source 1..19: mol_type = other RNA
acacagaaatgtagctgtg

SEQ ID NO: 3024 - RNA, 19 nt, synthetic construct
  source 1..19: mol_type = other RNA
cacagaaatgtagctgtgt

SEQ ID NO: 3025 - RNA, 19 nt, synthetic construct
  source 1..19: mol_type = other RNA
acagaaatgtagctgtgtt

SEQ ID NO: 3026 - RNA, 19 nt, synthetic construct
  source 1..19: mol_type = other RNA
cagaaatgtagctgtgttc

SEQ ID NO: 3027 - RNA, 19 nt, synthetic construct
  source 1..19: mol_type = other RNA
agaaatgtagctgtgttct

SEQ ID NO: 3028 - RNA, 19 nt, synthetic construct
  source 1..19: mol_type = other RNA
gaaatgtagctgtgttctg

SEQ ID NO: 3029 - RNA, 19 nt, synthetic construct
  source 1..19: mol_type = other RNA
aaatgtagctgtgttctgg

SEQ ID NO: 3030 - RNA, 19 nt, synthetic construct
  source 1..19: mol_type = other RNA
aatgtagctgtgttctgga

SEQ ID NO: 3031 - RNA, 19 nt, synthetic construct
  source 1..19: mol_type = other RNA
atgtagctgtgttctggaa

SEQ ID NO: 3032 - RNA, 19 nt, synthetic construct
  source 1..19: mol_type = other RNA
tgtagctgtgttctggaac

SEQ ID NO: 3033 - RNA, 19 nt, synthetic construct
  source 1..19: mol_type = other RNA
gtagctgtgttctggaact

SEQ ID NO: 3034 - RNA, 19 nt, synthetic construct
  source 1..19: mol_type = other RNA
tagctgtgttctggaactg

SEQ ID NO: 3035 - RNA, 19 nt, synthetic construct
  source 1..19: mol_type = other RNA
agctgtgttctggaactga

SEQ ID NO: 3036 - RNA, 19 nt, synthetic construct
  source 1..19: mol_type = other RNA
gctgtgttctggaactgaa

SEQ ID NO: 3037 - RNA, 19 nt, synthetic construct
  source 1..19: mol_type = other RNA
ctgtgttctggaactgaat

SEQ ID NO: 3038 - RNA, 19 nt, synthetic construct
  source 1..19: mol_type = other RNA
tgtgttctggaactgaatc

SEQ ID NO: 3039 - RNA, 19 nt, synthetic construct
  source 1..19: mol_type = other RNA
gtgttctggaactgaatct

SEQ ID NO: 3040 - RNA, 19 nt, synthetic construct
  source 1..19: mol_type = other RNA
tgttctggaactgaatctt

SEQ ID NO: 3041 - RNA, 19 nt, synthetic construct
  source 1..19: mol_type = other RNA
gttctggaactgaatctta

SEQ ID NO: 3042 - RNA, 19 nt, synthetic construct
  source 1..19: mol_type = other RNA
ttctggaactgaatcttac

SEQ ID NO: 3043 - RNA, 19 nt, synthetic construct
  source 1..19: mol_type = other RNA
tctggaactgaatcttaca

SEQ ID NO: 3044 - RNA, 19 nt, synthetic construct
  source 1..19: mol_type = other RNA
ctggaactgaatcttacat

SEQ ID NO: 3045 - RNA, 19 nt, synthetic construct
  source 1..19: mol_type = other RNA
tggaactgaatcttacatg

SEQ ID NO: 3046 - RNA, 19 nt, synthetic construct
  source 1..19: mol_type = other RNA
ggaactgaatcttacatgg

SEQ ID NO: 3047 - RNA, 19 nt, synthetic construct
  source 1..19: mol_type = other RNA
gaactgaatcttacatggt

SEQ ID NO: 3048 - RNA, 19 nt, synthetic construct
  source 1..19: mol_type = other RNA
aactgaatcttacatggta

SEQ ID NO: 3049 - RNA, 19 nt, synthetic construct
  source 1..19: mol_type = other RNA
actgaatcttacatggtat

SEQ ID NO: 3050 - RNA, 19 nt, synthetic construct
  source 1..19: mol_type = other RNA
ctgaatcttacatggtata

SEQ ID NO: 3051 - RNA, 19 nt, synthetic construct
  source 1..19: mol_type = other RNA
tgaatcttacatggtatac

SEQ ID NO: 3052 - RNA, 19 nt, synthetic construct
  source 1..19: mol_type = other RNA
gaatcttacatggtatact

SEQ ID NO: 3053 - RNA, 19 nt, synthetic construct
  source 1..19: mol_type = other RNA
aatcttacatggtatactt

SEQ ID NO: 3054 - RNA, 19 nt, synthetic construct
  source 1..19: mol_type = other RNA
atcttacatggtatactta

SEQ ID NO: 3055 - RNA, 19 nt, synthetic construct
  source 1..19: mol_type = other RNA
tcttacatggtatacttag

SEQ ID NO: 3056 - RNA, 19 nt, synthetic construct
  source 1..19: mol_type = other RNA
cttacatggtatacttagt

SEQ ID NO: 3057 - RNA, 19 nt, synthetic construct
  source 1..19: mol_type = other RNA
ttacatggtatacttagtg

SEQ ID NO: 3058 - RNA, 19 nt, synthetic construct
  source 1..19: mol_type = other RNA
tacatggtatacttagtgc

SEQ ID NO: 3059 - RNA, 19 nt, synthetic construct
  source 1..19: mol_type = other RNA
acatggtatacttagtgct

SEQ ID NO: 3060 - RNA, 19 nt, synthetic construct
  source 1..19: mol_type = other RNA
catggtatacttagtgctg

SEQ ID NO: 3061 - RNA, 19 nt, synthetic construct
  source 1..19: mol_type = other RNA
atggtatacttagtgctgc

SEQ ID NO: 3062 - RNA, 19 nt, synthetic construct
  source 1..19: mol_type = other RNA
tggtatacttagtgctgct

SEQ ID NO: 3063 - RNA, 19 nt, synthetic construct
  source 1..19: mol_type = other RNA
ggtatacttagtgctgctg

SEQ ID NO: 3064 - RNA, 19 nt, synthetic construct
  source 1..19: mol_type = other RNA
gtatacttagtgctgctgg

SEQ ID NO: 3065 - RNA, 19 nt, synthetic construct
  source 1..19: mol_type = other RNA
tatacttagtgctgctggg

SEQ ID NO: 3066 - RNA, 19 nt, synthetic construct
  source 1..19: mol_type = other RNA
atacttagtgctgctgggt

SEQ ID NO: 3067 - RNA, 19 nt, synthetic construct
  source 1..19: mol_type = other RNA
tacttagtgctgctgggta

SEQ ID NO: 3068 - RNA, 19 nt, synthetic construct
  source 1..19: mol_type = other RNA
acttagtgctgctgggtaa

SEQ ID NO: 3069 - RNA, 19 nt, synthetic construct
  source 1..19: mol_type = other RNA
cttagtgctgctgggtaat

SEQ ID NO: 3070 - RNA, 19 nt, synthetic construct
  source 1..19: mol_type = other RNA
ttagtgctgctgggtaatt

SEQ ID NO: 3071 - RNA, 19 nt, synthetic construct
  source 1..19: mol_type = other RNA
tagtgctgctgggtaattt

SEQ ID NO: 3072 - RNA, 19 nt, synthetic construct
  source 1..19: mol_type = other RNA
agtgctgctgggtaatttg

SEQ ID NO: 3073 - RNA, 19 nt, synthetic construct
  source 1..19: mol_type = other RNA
gtgctgctgggtaatttgt

SEQ ID NO: 3074 - RNA, 19 nt, synthetic construct
  source 1..19: mol_type = other RNA
tgctgctgggtaatttgtt

SEQ ID NO: 3075 - RNA, 19 nt, synthetic construct
  source 1..19: mol_type = other RNA
gctgctgggtaatttgttg

SEQ ID NO: 3076 - RNA, 19 nt, synthetic construct
  source 1..19: mol_type = other RNA
ctgctgggtaatttgttgg

SEQ ID NO: 3077 - RNA, 19 nt, synthetic construct
  source 1..19: mol_type = other RNA
tgctgggtaatttgttggt

SEQ ID NO: 3078 - RNA, 19 nt, synthetic construct
  source 1..19: mol_type = other RNA
gctgggtaatttgttggta

SEQ ID NO: 3079 - RNA, 19 nt, synthetic construct
  source 1..19: mol_type = other RNA
ctgggtaatttgttggtat

SEQ ID NO: 3080 - RNA, 19 nt, synthetic construct
  source 1..19: mol_type = other RNA
tgggtaatttgttggtata

SEQ ID NO: 3081 - RNA, 19 nt, synthetic construct
  source 1..19: mol_type = other RNA
gggtaatttgttggtatat

SEQ ID NO: 3082 - RNA, 19 nt, synthetic construct
  source 1..19: mol_type = other RNA
ggtaatttgttggtatatt

SEQ ID NO: 3083 - RNA, 19 nt, synthetic construct
  source 1..19: mol_type = other RNA
gtaatttgttggtatatta

SEQ ID NO: 3084 - RNA, 19 nt, synthetic construct
  source 1..19: mol_type = other RNA
taatttgttggtatattat

SEQ ID NO: 3085 - RNA, 19 nt, synthetic construct
  source 1..19: mol_type = other RNA
aatttgttggtatattatc

SEQ ID NO: 3086 - RNA, 19 nt, synthetic construct
  source 1..19: mol_type = other RNA
atttgttggtatattatct

SEQ ID NO: 3087 - RNA, 19 nt, synthetic construct
  source 1..19: mol_type = other RNA
tttgttggtatattatctg

SEQ ID NO: 3088 - RNA, 19 nt, synthetic construct
  source 1..19: mol_type = other RNA
ttgttggtatattatctgg

SEQ ID NO: 3089 - RNA, 19 nt, synthetic construct
  source 1..19: mol_type = other RNA
tgttggtatattatctggt

SEQ ID NO: 3090 - RNA, 19 nt, synthetic construct
  source 1..19: mol_type = other RNA
gttggtatattatctggtt

SEQ ID NO: 3091 - RNA, 19 nt, synthetic construct
  source 1..19: mol_type = other RNA
ttggtatattatctggtta

SEQ ID NO: 3092 - RNA, 19 nt, synthetic construct
  source 1..19: mol_type = other RNA
tggtatattatctggttag

SEQ ID NO: 3093 - RNA, 19 nt, synthetic construct
  source 1..19: mol_type = other RNA
ggtatattatctggttagt

SEQ ID NO: 3094 - RNA, 19 nt, synthetic construct
  source 1..19: mol_type = other RNA
gtatattatctggttagtg

SEQ ID NO: 3095 - RNA, 19 nt, synthetic construct
  source 1..19: mol_type = other RNA
tatattatctggttagtgg

SEQ ID NO: 3096 - RNA, 19 nt, synthetic construct
  source 1..19: mol_type = other RNA
atattatctggttagtggt

SEQ ID NO: 3097 - RNA, 19 nt, synthetic construct
  source 1..19: mol_type = other RNA
tattatctggttagtggtt

SEQ ID NO: 3098 - RNA, 19 nt, synthetic construct
  source 1..19: mol_type = other RNA
attatctggttagtggtta

SEQ ID NO: 3099 - RNA, 19 nt, synthetic construct
  source 1..19: mol_type = other RNA
ttatctggttagtggttaa

SEQ ID NO: 3100 - RNA, 19 nt, synthetic construct
  source 1..19: mol_type = other RNA
tatctggttagtggttaat

SEQ ID NO: 3101 - RNA, 19 nt, synthetic construct
  source 1..19: mol_type = other RNA
atctggttagtggttaatg

SEQ ID NO: 3102 - RNA, 19 nt, synthetic construct
  source 1..19: mol_type = other RNA
tctggttagtggttaatgc

SEQ ID NO: 3103 - RNA, 19 nt, synthetic construct
  source 1..19: mol_type = other RNA
ctggttagtggttaatgct

SEQ ID NO: 3104 - RNA, 19 nt, synthetic construct
  source 1..19: mol_type = other RNA
tggttagtggttaatgctt

SEQ ID NO: 3105 - RNA, 19 nt, synthetic construct
  source 1..19: mol_type = other RNA
ggttagtggttaatgcttc

SEQ ID NO: 3106 - RNA, 19 nt, synthetic construct
  source 1..19: mol_type = other RNA
gttagtggttaatgcttcc

SEQ ID NO: 3107 - RNA, 19 nt, synthetic construct
  source 1..19: mol_type = other RNA
ttagtggttaatgcttcct

SEQ ID NO: 3108 - RNA, 19 nt, synthetic construct
  source 1..19: mol_type = other RNA
tagtggttaatgcttcctt

SEQ ID NO: 3109 - RNA, 19 nt, synthetic construct
  source 1..19: mol_type = other RNA
agtggttaatgcttccttt

SEQ ID NO: 3110 - RNA, 19 nt, synthetic construct
  source 1..19: mol_type = other RNA
gtggttaatgcttccttta

SEQ ID NO: 3111 - RNA, 19 nt, synthetic construct
  source 1..19: mol_type = other RNA
tggttaatgcttcctttaa

SEQ ID NO: 3112 - RNA, 19 nt, synthetic construct
  source 1..19: mol_type = other RNA
ggttaatgcttcctttaaa

SEQ ID NO: 3113 - RNA, 19 nt, synthetic construct
  source 1..19: mol_type = other RNA
gttaatgcttcctttaaaa

SEQ ID NO: 3114 - RNA, 19 nt, synthetic construct
  source 1..19: mol_type = other RNA
ttaatgcttcctttaaaaa

SEQ ID NO: 3115 - RNA, 19 nt, synthetic construct
  source 1..19: mol_type = other RNA
taatgcttcctttaaaaat

SEQ ID NO: 3116 - RNA, 19 nt, synthetic construct
  source 1..19: mol_type = other RNA
aatgcttcctttaaaaata

SEQ ID NO: 3117 - RNA, 19 nt, synthetic construct
  source 1..19: mol_type = other RNA
atgcttcctttaaaaataa

SEQ ID NO: 3118 - RNA, 19 nt, synthetic construct
  source 1..19: mol_type = other RNA
tgcttcctttaaaaataat

SEQ ID NO: 3119 - RNA, 19 nt, synthetic construct
  source 1..19: mol_type = other RNA
gcttcctttaaaaataatt

SEQ ID NO: 3120 - RNA, 19 nt, synthetic construct
  source 1..19: mol_type = other RNA
cttcctttaaaaataattg

SEQ ID NO: 3121 - RNA, 19 nt, synthetic construct
  source 1..19: mol_type = other RNA
ttcctttaaaaataattga

SEQ ID NO: 3122 - RNA, 19 nt, synthetic construct
  source 1..19: mol_type = other RNA
tcctttaaaaataattgag

SEQ ID NO: 3123 - RNA, 19 nt, synthetic construct
  source 1..19: mol_type = other RNA
cctttaaaaataattgagt

SEQ ID NO: 3124 - RNA, 19 nt, synthetic construct
  source 1..19: mol_type = other RNA
ctttaaaaataattgagtc

SEQ ID NO: 3125 - RNA, 19 nt, synthetic construct
  source 1..19: mol_type = other RNA
tttaaaaataattgagtca

SEQ ID NO: 3126 - RNA, 19 nt, synthetic construct
  source 1..19: mol_type = other RNA
ttaaaaataattgagtcat

SEQ ID NO: 3127 - RNA, 19 nt, synthetic construct
  source 1..19: mol_type = other RNA
taaaaataattgagtcatc

SEQ ID NO: 3128 - RNA, 19 nt, synthetic construct
  source 1..19: mol_type = other RNA
aaaaataattgagtcatcc

SEQ ID NO: 3129 - RNA, 19 nt, synthetic construct
  source 1..19: mol_type = other RNA
aaaataattgagtcatcca

SEQ ID NO: 3130 - RNA, 19 nt, synthetic construct
  source 1..19: mol_type = other RNA
aaataattgagtcatccat

SEQ ID NO: 3131 - RNA, 19 nt, synthetic construct
  source 1..19: mol_type = other RNA
aataattgagtcatccatt

SEQ ID NO: 3132 - RNA, 19 nt, synthetic construct
  source 1..19: mol_type = other RNA
ataattgagtcatccattc

SEQ ID NO: 3133 - RNA, 19 nt, synthetic construct
  source 1..19: mol_type = other RNA
taattgagtcatccattca

SEQ ID NO: 3134 - RNA, 19 nt, synthetic construct
  source 1..19: mol_type = other RNA
aattgagtcatccattcac

SEQ ID NO: 3135 - RNA, 19 nt, synthetic construct
  source 1..19: mol_type = other RNA
attgagtcatccattcact

SEQ ID NO: 3136 - RNA, 19 nt, synthetic construct
  source 1..19: mol_type = other RNA
ttgagtcatccattcactc

SEQ ID NO: 3137 - RNA, 19 nt, synthetic construct
  source 1..19: mol_type = other RNA
tgagtcatccattcactct

SEQ ID NO: 3138 - RNA, 19 nt, synthetic construct
  source 1..19: mol_type = other RNA
gagtcatccattcactctt

SEQ ID NO: 3139 - RNA, 19 nt, synthetic construct
  source 1..19: mol_type = other RNA
agtcatccattcactcttt

SEQ ID NO: 3140 - RNA, 19 nt, synthetic construct
  source 1..19: mol_type = other RNA
gtcatccattcactctttt

SEQ ID NO: 3141 - RNA, 19 nt, synthetic construct
  source 1..19: mol_type = other RNA
tcatccattcactcttttt

SEQ ID NO: 3142 - RNA, 19 nt, synthetic construct
  source 1..19: mol_type = other RNA
catccattcactctttttc

SEQ ID NO: 3143 - RNA, 19 nt, synthetic construct
  source 1..19: mol_type = other RNA
atccattcactctttttca

SEQ ID NO: 3144 - RNA, 19 nt, synthetic construct
  source 1..19: mol_type = other RNA
tccattcactctttttcag

SEQ ID NO: 3145 - RNA, 19 nt, synthetic construct
  source 1..19: mol_type = other RNA
ccattcactctttttcagt

SEQ ID NO: 3146 - RNA, 19 nt, synthetic construct
  source 1..19: mol_type = other RNA
cattcactctttttcagtt

SEQ ID NO: 3147 - RNA, 19 nt, synthetic construct
  source 1..19: mol_type = other RNA
attcactctttttcagttt

SEQ ID NO: 3148 - RNA, 19 nt, synthetic construct
  source 1..19: mol_type = other RNA
ttcactctttttcagtttt

SEQ ID NO: 3149 - RNA, 19 nt, synthetic construct
  source 1..19: mol_type = other RNA
tcactctttttcagtttta

SEQ ID NO: 3150 - RNA, 19 nt, synthetic construct
  source 1..19: mol_type = other RNA
cactctttttcagttttat

SEQ ID NO: 3151 - RNA, 19 nt, synthetic construct
  source 1..19: mol_type = other RNA
actctttttcagttttatc

SEQ ID NO: 3152 - RNA, 19 nt, synthetic construct
  source 1..19: mol_type = other RNA
ctctttttcagttttatct

SEQ ID NO: 3153 - RNA, 19 nt, synthetic construct
  source 1..19: mol_type = other RNA
tctttttcagttttatctg

SEQ ID NO: 3154 - RNA, 19 nt, synthetic construct
  source 1..19: mol_type = other RNA
ctttttcagttttatctgt

SEQ ID NO: 3155 - RNA, 19 nt, synthetic construct
  source 1..19: mol_type = other RNA
tttttcagttttatctgtc

SEQ ID NO: 3156 - RNA, 19 nt, synthetic construct
  source 1..19: mol_type = other RNA
ttttcagttttatctgtca

SEQ ID NO: 3157 - RNA, 19 nt, synthetic construct
  source 1..19: mol_type = other RNA
tttcagttttatctgtcaa

SEQ ID NO: 3158 - RNA, 19 nt, synthetic construct
  source 1..19: mol_type = other RNA
ttcagttttatctgtcaat

SEQ ID NO: 3159 - RNA, 19 nt, synthetic construct
  source 1..19: mol_type = other RNA
tcagttttatctgtcaata

SEQ ID NO: 3160 - RNA, 19 nt, synthetic construct
  source 1..19: mol_type = other RNA
cagttttatctgtcaatag

SEQ ID NO: 3161 - RNA, 19 nt, synthetic construct
  source 1..19: mol_type = other RNA
agttttatctgtcaatagt

SEQ ID NO: 3162 - RNA, 19 nt, synthetic construct
  source 1..19: mol_type = other RNA
gttttatctgtcaatagta

SEQ ID NO: 3163 - RNA, 19 nt, synthetic construct
  source 1..19: mol_type = other RNA
ttttatctgtcaatagtag

SEQ ID NO: 3164 - RNA, 19 nt, synthetic construct
  source 1..19: mol_type = other RNA
tttatctgtcaatagtagc

SEQ ID NO: 3165 - RNA, 19 nt, synthetic construct
  source 1..19: mol_type = other RNA
ttatctgtcaatagtagct

SEQ ID NO: 3166 - RNA, 19 nt, synthetic construct
  source 1..19: mol_type = other RNA
tatctgtcaatagtagcta

SEQ ID NO: 3167 - RNA, 19 nt, synthetic construct
  source 1..19: mol_type = other RNA
atctgtcaatagtagctac

SEQ ID NO: 3168 - RNA, 19 nt, synthetic construct
  source 1..19: mol_type = other RNA
tctgtcaatagtagctaca

SEQ ID NO: 3169 - RNA, 19 nt, synthetic construct
  source 1..19: mol_type = other RNA
ctgtcaatagtagctacat

SEQ ID NO: 3170 - RNA, 19 nt, synthetic construct
  source 1..19: mol_type = other RNA
tgtcaatagtagctacatt

SEQ ID NO: 3171 - RNA, 19 nt, synthetic construct
  source 1..19: mol_type = other RNA
gtcaatagtagctacattt

SEQ ID NO: 3172 - RNA, 19 nt, synthetic construct
  source 1..19: mol_type = other RNA
tcaatagtagctacatttt

SEQ ID NO: 3173 - RNA, 19 nt, synthetic construct
  source 1..19: mol_type = other RNA
caatagtagctacattttt

SEQ ID NO: 3174 - RNA, 19 nt, synthetic construct
  source 1..19: mol_type = other RNA
aatagtagctacattttta

SEQ ID NO: 3175 - RNA, 19 nt, synthetic construct
  source 1..19: mol_type = other RNA
atagtagctacatttttaa

SEQ ID NO: 3176 - RNA, 19 nt, synthetic construct
  source 1..19: mol_type = other RNA
tagtagctacatttttaat

SEQ ID NO: 3177 - RNA, 19 nt, synthetic construct
  source 1..19: mol_type = other RNA
agtagctacatttttaatg

SEQ ID NO: 3178 - RNA, 19 nt, synthetic construct
  source 1..19: mol_type = other RNA
gtagctacatttttaatgg

SEQ ID NO: 3179 - RNA, 19 nt, synthetic construct
  source 1..19: mol_type = other RNA
tagctacatttttaatggg

SEQ ID NO: 3180 - RNA, 19 nt, synthetic construct
  source 1..19: mol_type = other RNA
agctacatttttaatggga

SEQ ID NO: 3181 - RNA, 19 nt, synthetic construct
  source 1..19: mol_type = other RNA
gctacatttttaatgggag

SEQ ID NO: 3182 - RNA, 19 nt, synthetic construct
  source 1..19: mol_type = other RNA
ctacatttttaatgggagc

SEQ ID NO: 3183 - RNA, 19 nt, synthetic construct
  source 1..19: mol_type = other RNA
tacatttttaatgggagca

SEQ ID NO: 3184 - RNA, 19 nt, synthetic construct
  source 1..19: mol_type = other RNA
acatttttaatgggagcac

SEQ ID NO: 3185 - RNA, 19 nt, synthetic construct
  source 1..19: mol_type = other RNA
catttttaatgggagcacc

SEQ ID NO: 3186 - RNA, 19 nt, synthetic construct
  source 1..19: mol_type = other RNA
atttttaatgggagcacct

SEQ ID NO: 3187 - RNA, 19 nt, synthetic construct
  source 1..19: mol_type = other RNA
tttttaatgggagcacctt

SEQ ID NO: 3188 - RNA, 19 nt, synthetic construct
  source 1..19: mol_type = other RNA
ttttaatgggagcaccttt

SEQ ID NO: 3189 - RNA, 19 nt, synthetic construct
  source 1..19: mol_type = other RNA
tttaatgggagcacctttt

SEQ ID NO: 3190 - RNA, 19 nt, synthetic construct
  source 1..19: mol_type = other RNA
ttaatgggagcacctttta

SEQ ID NO: 3191 - RNA, 19 nt, synthetic construct
  source 1..19: mol_type = other RNA
taatgggagcaccttttat

SEQ ID NO: 3192 - RNA, 19 nt, synthetic construct
  source 1..19: mol_type = other RNA
aatgggagcaccttttatc

SEQ ID NO: 3193 - RNA, 19 nt, synthetic construct
  source 1..19: mol_type = other RNA
atgggagcaccttttatcc

SEQ ID NO: 3194 - RNA, 19 nt, synthetic construct
  source 1..19: mol_type = other RNA
tgggagcaccttttatccc

SEQ ID NO: 3195 - RNA, 19 nt, synthetic construct
  source 1..19: mol_type = other RNA
gggagcaccttttatccca

SEQ ID NO: 3196 - RNA, 19 nt, synthetic construct
  source 1..19: mol_type = other RNA
ggagcaccttttatcccaa

SEQ ID NO: 3197 - RNA, 19 nt, synthetic construct
  source 1..19: mol_type = other RNA
gagcaccttttatcccaaa

SEQ ID NO: 3198 - RNA, 19 nt, synthetic construct
  source 1..19: mol_type = other RNA
agcaccttttatcccaaag

SEQ ID NO: 3199 - RNA, 19 nt, synthetic construct
  source 1..19: mol_type = other RNA
gcaccttttatcccaaagt

SEQ ID NO: 3200 - RNA, 19 nt, synthetic construct
  source 1..19: mol_type = other RNA
caccttttatcccaaagtg

SEQ ID NO: 3201 - RNA, 19 nt, synthetic construct
  source 1..19: mol_type = other RNA
accttttatcccaaagtgc

SEQ ID NO: 3202 - RNA, 19 nt, synthetic construct
  source 1..19: mol_type = other RNA
ccttttatcccaaagtgct

SEQ ID NO: 3203 - RNA, 19 nt, synthetic construct
  source 1..19: mol_type = other RNA
cttttatcccaaagtgctt

SEQ ID NO: 3204 - RNA, 19 nt, synthetic construct
  source 1..19: mol_type = other RNA
ttttatcccaaagtgcttt

SEQ ID NO: 3205 - RNA, 19 nt, synthetic construct
  source 1..19: mol_type = other RNA
tttatcccaaagtgcttta

SEQ ID NO: 3206 - RNA, 19 nt, synthetic construct
  source 1..19: mol_type = other RNA
ttatcccaaagtgctttat

SEQ ID NO: 3207 - RNA, 19 nt, synthetic construct
  source 1..19: mol_type = other RNA
tatcccaaagtgctttata

SEQ ID NO: 3208 - RNA, 19 nt, synthetic construct
  source 1..19: mol_type = other RNA
atcccaaagtgctttataa

SEQ ID NO: 3209 - RNA, 19 nt, synthetic construct
  source 1..19: mol_type = other RNA
tcccaaagtgctttataaa

SEQ ID NO: 3210 - RNA, 19 nt, synthetic construct
  source 1..19: mol_type = other RNA
cccaaagtgctttataaat

SEQ ID NO: 3211 - RNA, 19 nt, synthetic construct
  source 1..19: mol_type = other RNA
ccaaagtgctttataaatt

SEQ ID NO: 3212 - RNA, 19 nt, synthetic construct
  source 1..19: mol_type = other RNA
caaagtgctttataaattg

SEQ ID NO: 3213 - RNA, 19 nt, synthetic construct
  source 1..19: mol_type = other RNA
aaagtgctttataaattga

SEQ ID NO: 3214 - RNA, 19 nt, synthetic construct
  source 1..19: mol_type = other RNA
aagtgctttataaattgag

SEQ ID NO: 3215 - RNA, 19 nt, synthetic construct
  source 1..19: mol_type = other RNA
agtgctttataaattgagt

SEQ ID NO: 3216 - RNA, 19 nt, synthetic construct
  source 1..19: mol_type = other RNA
gtgctttataaattgagtg

SEQ ID NO: 3217 - RNA, 19 nt, synthetic construct
  source 1..19: mol_type = other RNA
tgctttataaattgagtgg

SEQ ID NO: 3218 - RNA, 19 nt, synthetic construct
  source 1..19: mol_type = other RNA
gctttataaattgagtgga

SEQ ID NO: 3219 - RNA, 19 nt, synthetic construct
  source 1..19: mol_type = other RNA
ctttataaattgagtggac

SEQ ID NO: 3220 - RNA, 19 nt, synthetic construct
  source 1..19: mol_type = other RNA
tttataaattgagtggact

SEQ ID NO: 3221 - RNA, 19 nt, synthetic construct
  source 1..19: mol_type = other RNA
ttataaattgagtggactg

SEQ ID NO: 3222 - RNA, 19 nt, synthetic construct
  source 1..19: mol_type = other RNA
tataaattgagtggactga

SEQ ID NO: 3223 - RNA, 19 nt, synthetic construct
  source 1..19: mol_type = other RNA
ataaattgagtggactgat

SEQ ID NO: 3224 - RNA, 19 nt, synthetic construct
  source 1..19: mol_type = other RNA
taaattgagtggactgata

SEQ ID NO: 3225 - RNA, 19 nt, synthetic construct
  source 1..19: mol_type = other RNA
aaattgagtggactgatat

SEQ ID NO: 3226 - RNA, 19 nt, synthetic construct
  source 1..19: mol_type = other RNA
aattgagtggactgatata

SEQ ID NO: 3227 - RNA, 19 nt, synthetic construct
  source 1..19: mol_type = other RNA
attgagtggactgatatat

SEQ ID NO: 3228 - RNA, 19 nt, synthetic construct
  source 1..19: mol_type = other RNA
ttgagtggactgatatata

SEQ ID NO: 3229 - RNA, 19 nt, synthetic construct
  source 1..19: mol_type = other RNA
tgagtggactgatatatat

SEQ ID NO: 3230 - RNA, 19 nt, synthetic construct
  source 1..19: mol_type = other RNA
gagtggactgatatatatc

SEQ ID NO: 3231 - RNA, 19 nt, synthetic construct
  source 1..19: mol_type = other RNA
agtggactgatatatatca

SEQ ID NO: 3232 - RNA, 19 nt, synthetic construct
  source 1..19: mol_type = other RNA
gtggactgatatatatcac

SEQ ID NO: 3233 - RNA, 19 nt, synthetic construct
  source 1..19: mol_type = other RNA
tggactgatatatatcaca

SEQ ID NO: 3234 - RNA, 19 nt, synthetic construct
  source 1..19: mol_type = other RNA
ggactgatatatatcacac

SEQ ID NO: 3235 - RNA, 19 nt, synthetic construct
  source 1..19: mol_type = other RNA
gactgatatatatcacacc

SEQ ID NO: 3236 - RNA, 19 nt, synthetic construct
  source 1..19: mol_type = other RNA
actgatatatatcacaccc

SEQ ID NO: 3237 - RNA, 19 nt, synthetic construct
  source 1..19: mol_type = other RNA
ctgatatatatcacaccca

SEQ ID NO: 3238 - RNA, 19 nt, synthetic construct
  source 1..19: mol_type = other RNA
tgatatatatcacacccag

SEQ ID NO: 3239 - RNA, 19 nt, synthetic construct
  source 1..19: mol_type = other RNA
gatatatatcacacccagg

SEQ ID NO: 3240 - RNA, 19 nt, synthetic construct
  source 1..19: mol_type = other RNA
atatatatcacacccaggt

SEQ ID NO: 3241 - RNA, 19 nt, synthetic construct
  source 1..19: mol_type = other RNA
tatatatcacacccaggta

SEQ ID NO: 3242 - RNA, 19 nt, synthetic construct
  source 1..19: mol_type = other RNA
atatatcacacccaggtat

SEQ ID NO: 3243 - RNA, 19 nt, synthetic construct
  source 1..19: mol_type = other RNA
tatatcacacccaggtatc

SEQ ID NO: 3244 - RNA, 19 nt, synthetic construct
  source 1..19: mol_type = other RNA
atatcacacccaggtatca

SEQ ID NO: 3245 - RNA, 19 nt, synthetic construct
  source 1..19: mol_type = other RNA
tatcacacccaggtatcac

SEQ ID NO: 3246 - RNA, 19 nt, synthetic construct
  source 1..19: mol_type = other RNA
atcacacccaggtatcact

SEQ ID NO: 3247 - RNA, 19 nt, synthetic construct
  source 1..19: mol_type = other RNA
tcacacccaggtatcactg

SEQ ID NO: 3248 - RNA, 19 nt, synthetic construct
  source 1..19: mol_type = other RNA
cacacccaggtatcactgt

SEQ ID NO: 3249 - RNA, 19 nt, synthetic construct
  source 1..19: mol_type = other RNA
acacccaggtatcactgtg

SEQ ID NO: 3250 - RNA, 19 nt, synthetic construct
  source 1..19: mol_type = other RNA
cacccaggtatcactgtgc

SEQ ID NO: 3251 - RNA, 19 nt, synthetic construct
  source 1..19: mol_type = other RNA
acccaggtatcactgtgct

SEQ ID NO: 3252 - RNA, 19 nt, synthetic construct
  source 1..19: mol_type = other RNA
cccaggtatcactgtgctg

SEQ ID NO: 3253 - RNA, 19 nt, synthetic construct
  source 1..19: mol_type = other RNA
ccaggtatcactgtgctgt

SEQ ID NO: 3254 - RNA, 19 nt, synthetic construct
  source 1..19: mol_type = other RNA
caggtatcactgtgctgtc

SEQ ID NO: 3255 - RNA, 19 nt, synthetic construct
  source 1..19: mol_type = other RNA
aggtatcactgtgctgtcc

SEQ ID NO: 3256 - RNA, 19 nt, synthetic construct
  source 1..19: mol_type = other RNA
ggtatcactgtgctgtcct

SEQ ID NO: 3257 - RNA, 19 nt, synthetic construct
  source 1..19: mol_type = other RNA
gtatcactgtgctgtcctt

SEQ ID NO: 3258 - RNA, 19 nt, synthetic construct
  source 1..19: mol_type = other RNA
tatcactgtgctgtccttt

SEQ ID NO: 3259 - RNA, 19 nt, synthetic construct
  source 1..19: mol_type = other RNA
atcactgtgctgtcctttg

SEQ ID NO: 3260 - RNA, 19 nt, synthetic construct
  source 1..19: mol_type = other RNA
tcactgtgctgtcctttgc

SEQ ID NO: 3261 - RNA, 19 nt, synthetic construct
  source 1..19: mol_type = other RNA
cactgtgctgtcctttgct

SEQ ID NO: 3262 - RNA, 19 nt, synthetic construct
  source 1..19: mol_type = other RNA
actgtgctgtcctttgctg

SEQ ID NO: 3263 - RNA, 19 nt, synthetic construct
  source 1..19: mol_type = other RNA
ctgtgctgtcctttgctgt

SEQ ID NO: 3264 - RNA, 19 nt, synthetic construct
  source 1..19: mol_type = other RNA
tgtgctgtcctttgctgtc

SEQ ID NO: 3265 - RNA, 19 nt, synthetic construct
  source 1..19: mol_type = other RNA
gtgctgtcctttgctgtca

SEQ ID NO: 3266 - RNA, 19 nt, synthetic construct
  source 1..19: mol_type = other RNA
tgctgtcctttgctgtcag

SEQ ID NO: 3267 - RNA, 19 nt, synthetic construct
  source 1..19: mol_type = other RNA
gctgtcctttgctgtcaga

SEQ ID NO: 3268 - RNA, 19 nt, synthetic construct
  source 1..19: mol_type = other RNA
ctgtcctttgctgtcagat

SEQ ID NO: 3269 - RNA, 19 nt, synthetic construct
  source 1..19: mol_type = other RNA
tgtcctttgctgtcagatt

SEQ ID NO: 3270 - RNA, 19 nt, synthetic construct
  source 1..19: mol_type = other RNA
gtcctttgctgtcagattt

SEQ ID NO: 3271 - RNA, 19 nt, synthetic construct
  source 1..19: mol_type = other RNA
tcctttgctgtcagattta

SEQ ID NO: 3272 - RNA, 19 nt, synthetic construct
  source 1..19: mol_type = other RNA
cctttgctgtcagatttag

SEQ ID NO: 3273 - RNA, 19 nt, synthetic construct
  source 1..19: mol_type = other RNA
ctttgctgtcagatttaga

SEQ ID NO: 3274 - RNA, 19 nt, synthetic construct
  source 1..19: mol_type = other RNA
tttgctgtcagatttagaa

SEQ ID NO: 3275 - RNA, 19 nt, synthetic construct
  source 1..19: mol_type = other RNA
ttgctgtcagatttagaaa

SEQ ID NO: 3276 - RNA, 19 nt, synthetic construct
  source 1..19: mol_type = other RNA
tgctgtcagatttagaaat

SEQ ID NO: 3277 - RNA, 19 nt, synthetic construct
  source 1..19: mol_type = other RNA
gctgtcagatttagaaatg

SEQ ID NO: 3278 - RNA, 19 nt, synthetic construct
  source 1..19: mol_type = other RNA
ctgtcagatttagaaatgt

SEQ ID NO: 3279 - RNA, 19 nt, synthetic construct
  source 1..19: mol_type = other RNA
tgtcagatttagaaatgtt

SEQ ID NO: 3280 - RNA, 19 nt, synthetic construct
  source 1..19: mol_type = other RNA
gtcagatttagaaatgttt

SEQ ID NO: 3281 - RNA, 19 nt, synthetic construct
  source 1..19: mol_type = other RNA
tcagatttagaaatgtttt

SEQ ID NO: 3282 - RNA, 19 nt, synthetic construct
  source 1..19: mol_type = other RNA
cagatttagaaatgttttt

SEQ ID NO: 3283 - RNA, 19 nt, synthetic construct
  source 1..19: mol_type = other RNA
agatttagaaatgttttta

SEQ ID NO: 3284 - RNA, 19 nt, synthetic construct
  source 1..19: mol_type = other RNA
gatttagaaatgtttttaa

SEQ ID NO: 3285 - RNA, 19 nt, synthetic construct
  source 1..19: mol_type = other RNA
atttagaaatgtttttaag

SEQ ID NO: 3286 - RNA, 19 nt, synthetic construct
  source 1..19: mol_type = other RNA
tttagaaatgtttttaaga

SEQ ID NO: 3287 - RNA, 19 nt, synthetic construct
  source 1..19: mol_type = other RNA
ttagaaatgtttttaagag

SEQ ID NO: 3288 - RNA, 19 nt, synthetic construct
  source 1..19: mol_type = other RNA
tagaaatgtttttaagagc

SEQ ID NO: 3289 - RNA, 19 nt, synthetic construct
  source 1..19: mol_type = other RNA
agaaatgtttttaagagct

SEQ ID NO: 3290 - RNA, 19 nt, synthetic construct
  source 1..19: mol_type = other RNA
gaaatgtttttaagagcta

SEQ ID NO: 3291 - RNA, 19 nt, synthetic construct
  source 1..19: mol_type = other RNA
aaatgtttttaagagctat

SEQ ID NO: 3292 - RNA, 19 nt, synthetic construct
  source 1..19: mol_type = other RNA
aatgtttttaagagctatg

SEQ ID NO: 3293 - RNA, 19 nt, synthetic construct
  source 1..19: mol_type = other RNA
atgtttttaagagctatgt

SEQ ID NO: 3294 - RNA, 19 nt, synthetic construct
  source 1..19: mol_type = other RNA
tgtttttaagagctatgtg

SEQ ID NO: 3295 - RNA, 19 nt, synthetic construct
  source 1..19: mol_type = other RNA
gtttttaagagctatgtga

SEQ ID NO: 3296 - RNA, 19 nt, synthetic construct
  source 1..19: mol_type = other RNA
tttttaagagctatgtgaa

SEQ ID NO: 3297 - RNA, 19 nt, synthetic construct
  source 1..19: mol_type = other RNA
ttttaagagctatgtgaaa

SEQ ID NO: 3298 - RNA, 19 nt, synthetic construct
  source 1..19: mol_type = other RNA
tttaagagctatgtgaaaa

SEQ ID NO: 3299 - RNA, 19 nt, synthetic construct
  source 1..19: mol_type = other RNA
ttaagagctatgtgaaaac

SEQ ID NO: 3300 - RNA, 19 nt, synthetic construct
  source 1..19: mol_type = other RNA
taagagctatgtgaaaaca

SEQ ID NO: 3301 - RNA, 19 nt, synthetic construct
  source 1..19: mol_type = other RNA
aagagctatgtgaaaacag

SEQ ID NO: 3302 - RNA, 19 nt, synthetic construct
  source 1..19: mol_type = other RNA
agagctatgtgaaaacaga

SEQ ID NO: 3303 - RNA, 19 nt, synthetic construct
  source 1..19: mol_type = other RNA
gagctatgtgaaaacagac

SEQ ID NO: 3304 - RNA, 19 nt, synthetic construct
  source 1..19: mol_type = other RNA
agctatgtgaaaacagaca

SEQ ID NO: 3305 - RNA, 19 nt, synthetic construct
  source 1..19: mol_type = other RNA
gctatgtgaaaacagacaa

SEQ ID NO: 3306 - RNA, 19 nt, synthetic construct
  source 1..19: mol_type = other RNA
ctatgtgaaaacagacaat

SEQ ID NO: 3307 - RNA, 19 nt, synthetic construct
  source 1..19: mol_type = other RNA
tatgtgaaaacagacaata

SEQ ID NO: 3308 - RNA, 19 nt, synthetic construct
  source 1..19: mol_type = other RNA
atgtgaaaacagacaatat

SEQ ID NO: 3309 - RNA, 19 nt, synthetic construct
  source 1..19: mol_type = other RNA
tgtgaaaacagacaatatt

SEQ ID NO: 3310 - RNA, 19 nt, synthetic construct
  source 1..19: mol_type = other RNA
gtgaaaacagacaatatta

SEQ ID NO: 3311 - RNA, 19 nt, synthetic construct
  source 1..19: mol_type = other RNA
tgaaaacagacaatattag

SEQ ID NO: 3312 - RNA, 19 nt, synthetic construct
  source 1..19: mol_type = other RNA
gaaaacagacaatattagt

SEQ ID NO: 3313 - RNA, 19 nt, synthetic construct
  source 1..19: mol_type = other RNA
aaaacagacaatattagtt

SEQ ID NO: 3314 - RNA, 19 nt, synthetic construct
  source 1..19: mol_type = other RNA
aaacagacaatattagttt

SEQ ID NO: 3315 - RNA, 19 nt, synthetic construct
  source 1..19: mol_type = other RNA
aacagacaatattagttta

SEQ ID NO: 3316 - RNA, 19 nt, synthetic construct
  source 1..19: mol_type = other RNA
acagacaatattagtttag

SEQ ID NO: 3317 - RNA, 19 nt, synthetic construct
  source 1..19: mol_type = other RNA
cagacaatattagtttagg

SEQ ID NO: 3318 - RNA, 19 nt, synthetic construct
  source 1..19: mol_type = other RNA
agacaatattagtttaggt

SEQ ID NO: 3319 - RNA, 19 nt, synthetic construct
  source 1..19: mol_type = other RNA
gacaatattagtttaggtc

SEQ ID NO: 3320 - RNA, 19 nt, synthetic construct
  source 1..19: mol_type = other RNA
acaatattagtttaggtcg

SEQ ID NO: 3321 - RNA, 19 nt, synthetic construct
  source 1..19: mol_type = other RNA
caatattagtttaggtcgg

SEQ ID NO: 3322 - RNA, 19 nt, synthetic construct
  source 1..19: mol_type = other RNA
aatattagtttaggtcggg

SEQ ID NO: 3323 - RNA, 19 nt, synthetic construct
  source 1..19: mol_type = other RNA
atattagtttaggtcggga

SEQ ID NO: 3324 - RNA, 19 nt, synthetic construct
  source 1..19: mol_type = other RNA
tattagtttaggtcgggaa

SEQ ID NO: 3325 - RNA, 19 nt, synthetic construct
  source 1..19: mol_type = other RNA
attagtttaggtcgggaac

SEQ ID NO: 3326 - RNA, 19 nt, synthetic construct
  source 1..19: mol_type = other RNA
ttagtttaggtcgggaact

SEQ ID NO: 3327 - RNA, 19 nt, synthetic construct
  source 1..19: mol_type = other RNA
tagtttaggtcgggaactg

SEQ ID NO: 3328 - RNA, 19 nt, synthetic construct
  source 1..19: mol_type = other RNA
agtttaggtcgggaactga

SEQ ID NO: 3329 - RNA, 19 nt, synthetic construct
  source 1..19: mol_type = other RNA
gtttaggtcgggaactgag

SEQ ID NO: 3330 - RNA, 19 nt, synthetic construct
  source 1..19: mol_type = other RNA
tttaggtcgggaactgaga

SEQ ID NO: 3331 - RNA, 19 nt, synthetic construct
  source 1..19: mol_type = other RNA
ttaggtcgggaactgagat

SEQ ID NO: 3332 - RNA, 19 nt, synthetic construct
  source 1..19: mol_type = other RNA
taggtcgggaactgagata

SEQ ID NO: 3333 - RNA, 19 nt, synthetic construct
  source 1..19: mol_type = other RNA
aggtcgggaactgagatat

SEQ ID NO: 3334 - RNA, 19 nt, synthetic construct
  source 1..19: mol_type = other RNA
ggtcgggaactgagatatt

SEQ ID NO: 3335 - RNA, 19 nt, synthetic construct
  source 1..19: mol_type = other RNA
gtcgggaactgagatattg

SEQ ID NO: 3336 - RNA, 19 nt, synthetic construct
  source 1..19: mol_type = other RNA
tcgggaactgagatattgt

SEQ ID NO: 3337 - RNA, 19 nt, synthetic construct
  source 1..19: mol_type = other RNA
cgggaactgagatattgta

SEQ ID NO: 3338 - RNA, 19 nt, synthetic construct
  source 1..19: mol_type = other RNA
gggaactgagatattgtaa

SEQ ID NO: 3339 - RNA, 19 nt, synthetic construct
  source 1..19: mol_type = other RNA
ggaactgagatattgtaat

SEQ ID NO: 3340 - RNA, 19 nt, synthetic construct
  source 1..19: mol_type = other RNA
gaactgagatattgtaatc

SEQ ID NO: 3341 - RNA, 19 nt, synthetic construct
  source 1..19: mol_type = other RNA
aactgagatattgtaatca

SEQ ID NO: 3342 - RNA, 19 nt, synthetic construct
  source 1..19: mol_type = other RNA
actgagatattgtaatcaa

SEQ ID NO: 3343 - RNA, 19 nt, synthetic construct
  source 1..19: mol_type = other RNA
ctgagatattgtaatcaaa

SEQ ID NO: 3344 - RNA, 19 nt, synthetic construct
  source 1..19: mol_type = other RNA
tgagatattgtaatcaaat

SEQ ID NO: 3345 - RNA, 19 nt, synthetic construct
  source 1..19: mol_type = other RNA
gagatattgtaatcaaata

SEQ ID NO: 3346 - RNA, 19 nt, synthetic construct
  source 1..19: mol_type = other RNA
agatattgtaatcaaatag

SEQ ID NO: 3347 - RNA, 19 nt, synthetic construct
  source 1..19: mol_type = other RNA
gatattgtaatcaaatagt

SEQ ID NO: 3348 - RNA, 19 nt, synthetic construct
  source 1..19: mol_type = other RNA
atattgtaatcaaatagtt

SEQ ID NO: 3349 - RNA, 19 nt, synthetic construct
  source 1..19: mol_type = other RNA
tattgtaatcaaatagtta

SEQ ID NO: 3350 - RNA, 19 nt, synthetic construct
  source 1..19: mol_type = other RNA
attgtaatcaaatagttaa

SEQ ID NO: 3351 - RNA, 19 nt, synthetic construct
  source 1..19: mol_type = other RNA
ttgtaatcaaatagttaac

SEQ ID NO: 3352 - RNA, 19 nt, synthetic construct
  source 1..19: mol_type = other RNA
tgtaatcaaatagttaaca

SEQ ID NO: 3353 - RNA, 19 nt, synthetic construct
  source 1..19: mol_type = other RNA
gtaatcaaatagttaacat

SEQ ID NO: 3354 - RNA, 19 nt, synthetic construct
  source 1..19: mol_type = other RNA
taatcaaatagttaacatc

SEQ ID NO: 3355 - RNA, 19 nt, synthetic construct
  source 1..19: mol_type = other RNA
aatcaaatagttaacatca

SEQ ID NO: 3356 - RNA, 19 nt, synthetic construct
  source 1..19: mol_type = other RNA
atcaaatagttaacatcag

SEQ ID NO: 3357 - RNA, 19 nt, synthetic construct
  source 1..19: mol_type = other RNA
tcaaatagttaacatcagg

SEQ ID NO: 3358 - RNA, 19 nt, synthetic construct
  source 1..19: mol_type = other RNA
caaatagttaacatcagga

SEQ ID NO: 3359 - RNA, 19 nt, synthetic construct
  source 1..19: mol_type = other RNA
aaatagttaacatcaggaa

SEQ ID NO: 3360 - RNA, 19 nt, synthetic construct
  source 1..19: mol_type = other RNA
aatagttaacatcaggaag

SEQ ID NO: 3361 - RNA, 19 nt, synthetic construct
  source 1..19: mol_type = other RNA
atagttaacatcaggaagt

SEQ ID NO: 3362 - RNA, 19 nt, synthetic construct
  source 1..19: mol_type = other RNA
tagttaacatcaggaagtt

SEQ ID NO: 3363 - RNA, 19 nt, synthetic construct
  source 1..19: mol_type = other RNA
agttaacatcaggaagtta

SEQ ID NO: 3364 - RNA, 19 nt, synthetic construct
  source 1..19: mol_type = other RNA
gttaacatcaggaagttaa

SEQ ID NO: 3365 - RNA, 19 nt, synthetic construct
  source 1..19: mol_type = other RNA
ttaacatcaggaagttaat

SEQ ID NO: 3366 - RNA, 19 nt, synthetic construct
  source 1..19: mol_type = other RNA
taacatcaggaagttaatt

SEQ ID NO: 3367 - RNA, 19 nt, synthetic construct
  source 1..19: mol_type = other RNA
aacatcaggaagttaattt

SEQ ID NO: 3368 - RNA, 19 nt, synthetic construct
  source 1..19: mol_type = other RNA
acatcaggaagttaatttg

SEQ ID NO: 3369 - RNA, 19 nt, synthetic construct
  source 1..19: mol_type = other RNA
catcaggaagttaatttgg

SEQ ID NO: 3370 - RNA, 19 nt, synthetic construct
  source 1..19: mol_type = other RNA
atcaggaagttaatttggc

SEQ ID NO: 3371 - RNA, 19 nt, synthetic construct
  source 1..19: mol_type = other RNA
tcaggaagttaatttggct

SEQ ID NO: 3372 - RNA, 19 nt, synthetic construct
  source 1..19: mol_type = other RNA
caggaagttaatttggctg

SEQ ID NO: 3373 - RNA, 19 nt, synthetic construct
  source 1..19: mol_type = other RNA
aggaagttaatttggctgg

SEQ ID NO: 3374 - RNA, 19 nt, synthetic construct
  source 1..19: mol_type = other RNA
ggaagttaatttggctggc

SEQ ID NO: 3375 - RNA, 19 nt, synthetic construct
  source 1..19: mol_type = other RNA
gaagttaatttggctggca

SEQ ID NO: 3376 - RNA, 19 nt, synthetic construct
  source 1..19: mol_type = other RNA
aagttaatttggctggcaa

SEQ ID NO: 3377 - RNA, 19 nt, synthetic construct
  source 1..19: mol_type = other RNA
agttaatttggctggcaaa

SEQ ID NO: 3378 - RNA, 19 nt, synthetic construct
  source 1..19: mol_type = other RNA
gttaatttggctggcaaaa

SEQ ID NO: 3379 - RNA, 19 nt, synthetic construct
  source 1..19: mol_type = other RNA
ttaatttggctggcaaaat

SEQ ID NO: 3380 - RNA, 19 nt, synthetic construct
  source 1..19: mol_type = other RNA
taatttggctggcaaaatt

SEQ ID NO: 3381 - RNA, 19 nt, synthetic construct
  source 1..19: mol_type = other RNA
aatttggctggcaaaattc

SEQ ID NO: 3382 - RNA, 19 nt, synthetic construct
  source 1..19: mol_type = other RNA
atttggctggcaaaattct

SEQ ID NO: 3383 - RNA, 19 nt, synthetic construct
  source 1..19: mol_type = other RNA
tttggctggcaaaattcta

SEQ ID NO: 3384 - RNA, 19 nt, synthetic construct
  source 1..19: mol_type = other RNA
ttggctggcaaaattctag

SEQ ID NO: 3385 - RNA, 19 nt, synthetic construct
  source 1..19: mol_type = other RNA
tggctggcaaaattctagg

SEQ ID NO: 3386 - RNA, 19 nt, synthetic construct
  source 1..19: mol_type = other RNA
ggctggcaaaattctaggg

SEQ ID NO: 3387 - RNA, 19 nt, synthetic construct
  source 1..19: mol_type = other RNA
gctggcaaaattctaggga

SEQ ID NO: 3388 - RNA, 19 nt, synthetic construct
  source 1..19: mol_type = other RNA
ctggcaaaattctagggaa

SEQ ID NO: 3389 - RNA, 19 nt, synthetic construct
  source 1..19: mol_type = other RNA
tggcaaaattctagggaaa

SEQ ID NO: 3390 - RNA, 19 nt, synthetic construct
  source 1..19: mol_type = other RNA
ggcaaaattctagggaaac

SEQ ID NO: 3391 - RNA, 19 nt, synthetic construct
  source 1..19: mol_type = other RNA
gcaaaattctagggaaact

SEQ ID NO: 3392 - RNA, 19 nt, synthetic construct
  source 1..19: mol_type = other RNA
caaaattctagggaaactt

SEQ ID NO: 3393 - RNA, 19 nt, synthetic construct
  source 1..19: mol_type = other RNA
aaaattctagggaaacttg

SEQ ID NO: 3394 - RNA, 19 nt, synthetic construct
  source 1..19: mol_type = other RNA
aaattctagggaaacttgg

SEQ ID NO: 3395 - RNA, 19 nt, synthetic construct
  source 1..19: mol_type = other RNA
aattctagggaaacttggc

SEQ ID NO: 3396 - RNA, 19 nt, synthetic construct
  source 1..19: mol_type = other RNA
attctagggaaacttggcc

SEQ ID NO: 3397 - RNA, 19 nt, synthetic construct
  source 1..19: mol_type = other RNA
ttctagggaaacttggcca

SEQ ID NO: 3398 - RNA, 19 nt, synthetic construct
  source 1..19: mol_type = other RNA
tctagggaaacttggccag

SEQ ID NO: 3399 - RNA, 19 nt, synthetic construct
  source 1..19: mol_type = other RNA
ctagggaaacttggccaga

SEQ ID NO: 3400 - RNA, 19 nt, synthetic construct
  source 1..19: mol_type = other RNA
tagggaaacttggccagaa

SEQ ID NO: 3401 - RNA, 19 nt, synthetic construct
  source 1..19: mol_type = other RNA
agggaaacttggccagaaa

SEQ ID NO: 3402 - RNA, 19 nt, synthetic construct
  source 1..19: mol_type = other RNA
gggaaacttggccagaaaa

SEQ ID NO: 3403 - RNA, 19 nt, synthetic construct
  source 1..19: mol_type = other RNA
ggaaacttggccagaaaac

SEQ ID NO: 3404 - RNA, 19 nt, synthetic construct
  source 1..19: mol_type = other RNA
gaaacttggccagaaaact

SEQ ID NO: 3405 - RNA, 19 nt, synthetic construct
  source 1..19: mol_type = other RNA
aaacttggccagaaaactg

SEQ ID NO: 3406 - RNA, 19 nt, synthetic construct
  source 1..19: mol_type = other RNA
aacttggccagaaaactgg

SEQ ID NO: 3407 - RNA, 19 nt, synthetic construct
  source 1..19: mol_type = other RNA
acttggccagaaaactggt

SEQ ID NO: 3408 - RNA, 19 nt, synthetic construct
  source 1..19: mol_type = other RNA
cttggccagaaaactggtg

SEQ ID NO: 3409 - RNA, 19 nt, synthetic construct
  source 1..19: mol_type = other RNA
ttggccagaaaactggtgt

SEQ ID NO: 3410 - RNA, 19 nt, synthetic construct
  source 1..19: mol_type = other RNA
tggccagaaaactggtgtt

SEQ ID NO: 3411 - RNA, 19 nt, synthetic construct
  source 1..19: mol_type = other RNA
ggccagaaaactggtgttg

SEQ ID NO: 3412 - RNA, 19 nt, synthetic construct
  source 1..19: mol_type = other RNA
gccagaaaactggtgttga

SEQ ID NO: 3413 - RNA, 19 nt, synthetic construct
  source 1..19: mol_type = other RNA
ccagaaaactggtgttgaa

SEQ ID NO: 3414 - RNA, 19 nt, synthetic construct
  source 1..19: mol_type = other RNA
cagaaaactggtgttgaag

SEQ ID NO: 3415 - RNA, 19 nt, synthetic construct
  source 1..19: mol_type = other RNA
agaaaactggtgttgaagg

SEQ ID NO: 3416 - RNA, 19 nt, synthetic construct
  source 1..19: mol_type = other RNA
gaaaactggtgttgaaggc

SEQ ID NO: 3417 - RNA, 19 nt, synthetic construct
  source 1..19: mol_type = other RNA
aaaactggtgttgaaggct

SEQ ID NO: 3418 - RNA, 19 nt, synthetic construct
  source 1..19: mol_type = other RNA
aaactggtgttgaaggctt

SEQ ID NO: 3419 - RNA, 19 nt, synthetic construct
  source 1..19: mol_type = other RNA
aactggtgttgaaggcttt

SEQ ID NO: 3420 - RNA, 19 nt, synthetic construct
  source 1..19: mol_type = other RNA
actggtgttgaaggctttt

SEQ ID NO: 3421 - RNA, 19 nt, synthetic construct
  source 1..19: mol_type = other RNA
ctggtgttgaaggcttttg

SEQ ID NO: 3422 - RNA, 19 nt, synthetic construct
  source 1..19: mol_type = other RNA
tggtgttgaaggcttttgc

SEQ ID NO: 3423 - RNA, 19 nt, synthetic construct
  source 1..19: mol_type = other RNA
ggtgttgaaggcttttgct

SEQ ID NO: 3424 - RNA, 19 nt, synthetic construct
  source 1..19: mol_type = other RNA
gtgttgaaggcttttgctc

SEQ ID NO: 3425 - RNA, 19 nt, synthetic construct
  source 1..19: mol_type = other RNA
tgttgaaggcttttgctca

SEQ ID NO: 3426 - RNA, 19 nt, synthetic construct
  source 1..19: mol_type = other RNA
gttgaaggcttttgctcat

SEQ ID NO: 3427 - RNA, 19 nt, synthetic construct
  source 1..19: mol_type = other RNA
ttgaaggcttttgctcata

SEQ ID NO: 3428 - RNA, 19 nt, synthetic construct
  source 1..19: mol_type = other RNA
tgaaggcttttgctcatat

SEQ ID NO: 3429 - RNA, 19 nt, synthetic construct
  source 1..19: mol_type = other RNA
gaaggcttttgctcatata

SEQ ID NO: 3430 - RNA, 19 nt, synthetic construct
  source 1..19: mol_type = other RNA
aaggcttttgctcatataa

SEQ ID NO: 3431 - RNA, 19 nt, synthetic construct
  source 1..19: mol_type = other RNA
aggcttttgctcatataaa

SEQ ID NO: 3432 - RNA, 19 nt, synthetic construct
  source 1..19: mol_type = other RNA
ggcttttgctcatataaac

SEQ ID NO: 3433 - RNA, 19 nt, synthetic construct
  source 1..19: mol_type = other RNA
gcttttgctcatataaaca

SEQ ID NO: 3434 - RNA, 19 nt, synthetic construct
  source 1..19: mol_type = other RNA
cttttgctcatataaacaa

SEQ ID NO: 3435 - RNA, 19 nt, synthetic construct
  source 1..19: mol_type = other RNA
ttttgctcatataaacaag

SEQ ID NO: 3436 - RNA, 19 nt, synthetic construct
  source 1..19: mol_type = other RNA
tttgctcatataaacaagt

SEQ ID NO: 3437 - RNA, 19 nt, synthetic construct
  source 1..19: mol_type = other RNA
ttgctcatataaacaagtg

SEQ ID NO: 3438 - RNA, 19 nt, synthetic construct
  source 1..19: mol_type = other RNA
tgctcatataaacaagtgc

SEQ ID NO: 3439 - RNA, 19 nt, synthetic construct
  source 1..19: mol_type = other RNA
gctcatataaacaagtgcc

SEQ ID NO: 3440 - RNA, 19 nt, synthetic construct
  source 1..19: mol_type = other RNA
ctcatataaacaagtgcca

SEQ ID NO: 3441 - RNA, 19 nt, synthetic construct
  source 1..19: mol_type = other RNA
tcatataaacaagtgccat

SEQ ID NO: 3442 - RNA, 19 nt, synthetic construct
  source 1..19: mol_type = other RNA
catataaacaagtgccatt

SEQ ID NO: 3443 - RNA, 19 nt, synthetic construct
  source 1..19: mol_type = other RNA
atataaacaagtgccattg

SEQ ID NO: 3444 - RNA, 19 nt, synthetic construct
  source 1..19: mol_type = other RNA
tataaacaagtgccattga

SEQ ID NO: 3445 - RNA, 19 nt, synthetic construct
  source 1..19: mol_type = other RNA
ataaacaagtgccattgag

SEQ ID NO: 3446 - RNA, 19 nt, synthetic construct
  source 1..19: mol_type = other RNA
taaacaagtgccattgagt

SEQ ID NO: 3447 - RNA, 19 nt, synthetic construct
  source 1..19: mol_type = other RNA
aaacaagtgccattgagtt

SEQ ID NO: 3448 - RNA, 19 nt, synthetic construct
  source 1..19: mol_type = other RNA
aacaagtgccattgagttt

SEQ ID NO: 3449 - RNA, 19 nt, synthetic construct
  source 1..19: mol_type = other RNA
acaagtgccattgagtttc

SEQ ID NO: 3450 - RNA, 19 nt, synthetic construct
  source 1..19: mol_type = other RNA
caagtgccattgagtttca

SEQ ID NO: 3451 - RNA, 19 nt, synthetic construct
  source 1..19: mol_type = other RNA
aagtgccattgagtttcaa

SEQ ID NO: 3452 - RNA, 19 nt, synthetic construct
  source 1..19: mol_type = other RNA
agtgccattgagtttcaaa

SEQ ID NO: 3453 - RNA, 19 nt, synthetic construct
  source 1..19: mol_type = other RNA
gtgccattgagtttcaaat

SEQ ID NO: 3454 - RNA, 19 nt, synthetic construct
  source 1..19: mol_type = other RNA
tgccattgagtttcaaatg

SEQ ID NO: 3455 - RNA, 19 nt, synthetic construct
  source 1..19: mol_type = other RNA
gccattgagtttcaaatga

SEQ ID NO: 3456 - RNA, 19 nt, synthetic construct
  source 1..19: mol_type = other RNA
ccattgagtttcaaatgac

SEQ ID NO: 3457 - RNA, 19 nt, synthetic construct
  source 1..19: mol_type = other RNA
cattgagtttcaaatgacc

SEQ ID NO: 3458 - RNA, 19 nt, synthetic construct
  source 1..19: mol_type = other RNA
attgagtttcaaatgacca

SEQ ID NO: 3459 - RNA, 19 nt, synthetic construct
  source 1..19: mol_type = other RNA
ttgagtttcaaatgaccag

SEQ ID NO: 3460 - RNA, 19 nt, synthetic construct
  source 1..19: mol_type = other RNA
tgagtttcaaatgaccagc

SEQ ID NO: 3461 - RNA, 19 nt, synthetic construct
  source 1..19: mol_type = other RNA
gagtttcaaatgaccagca

SEQ ID NO: 3462 - RNA, 19 nt, synthetic construct
  source 1..19: mol_type = other RNA
agtttcaaatgaccagcaa

SEQ ID NO: 3463 - RNA, 19 nt, synthetic construct
  source 1..19: mol_type = other RNA
gtttcaaatgaccagcaaa

SEQ ID NO: 3464 - RNA, 19 nt, synthetic construct
  source 1..19: mol_type = other RNA
tttcaaatgaccagcaaat

SEQ ID NO: 3465 - RNA, 19 nt, synthetic construct
  source 1..19: mol_type = other RNA
ttcaaatgaccagcaaata

SEQ ID NO: 3466 - RNA, 19 nt, synthetic construct
  source 1..19: mol_type = other RNA
tcaaatgaccagcaaatat

SEQ ID NO: 3467 - RNA, 19 nt, synthetic construct
  source 1..19: mol_type = other RNA
caaatgaccagcaaatata

SEQ ID NO: 3468 - RNA, 19 nt, synthetic construct
  source 1..19: mol_type = other RNA
aaatgaccagcaaatatat

SEQ ID NO: 3469 - RNA, 19 nt, synthetic construct
  source 1..19: mol_type = other RNA
aatgaccagcaaatatatt

SEQ ID NO: 3470 - RNA, 19 nt, synthetic construct
  source 1..19: mol_type = other RNA
atgaccagcaaatatattt

SEQ ID NO: 3471 - RNA, 19 nt, synthetic construct
  source 1..19: mol_type = other RNA
tgaccagcaaatatattta

SEQ ID NO: 3472 - RNA, 19 nt, synthetic construct
  source 1..19: mol_type = other RNA
gaccagcaaatatatttag

SEQ ID NO: 3473 - RNA, 19 nt, synthetic construct
  source 1..19: mol_type = other RNA
accagcaaatatatttaga

SEQ ID NO: 3474 - RNA, 19 nt, synthetic construct
  source 1..19: mol_type = other RNA
ccagcaaatatatttagaa

SEQ ID NO: 3475 - RNA, 19 nt, synthetic construct
  source 1..19: mol_type = other RNA
cagcaaatatatttagaac

SEQ ID NO: 3476 - RNA, 19 nt, synthetic construct
  source 1..19: mol_type = other RNA
agcaaatatatttagaacc

SEQ ID NO: 3477 - RNA, 19 nt, synthetic construct
  source 1..19: mol_type = other RNA
gcaaatatatttagaaccc

SEQ ID NO: 3478 - RNA, 19 nt, synthetic construct
  source 1..19: mol_type = other RNA
caaatatatttagaaccct

SEQ ID NO: 3479 - RNA, 19 nt, synthetic construct
  source 1..19: mol_type = other RNA
aaatatatttagaaccctt

SEQ ID NO: 3480 - RNA, 19 nt, synthetic construct
  source 1..19: mol_type = other RNA
aatatatttagaacccttc

SEQ ID NO: 3481 - RNA, 19 nt, synthetic construct
  source 1..19: mol_type = other RNA
atatatttagaacccttcc

SEQ ID NO: 3482 - RNA, 19 nt, synthetic construct
  source 1..19: mol_type = other RNA
tatatttagaacccttcct

SEQ ID NO: 3483 - RNA, 19 nt, synthetic construct
  source 1..19: mol_type = other RNA
atatttagaacccttcctg

SEQ ID NO: 3484 - RNA, 19 nt, synthetic construct
  source 1..19: mol_type = other RNA
tatttagaacccttcctgt

SEQ ID NO: 3485 - RNA, 19 nt, synthetic construct
  source 1..19: mol_type = other RNA
atttagaacccttcctgtt

SEQ ID NO: 3486 - RNA, 19 nt, synthetic construct
  source 1..19: mol_type = other RNA
tttagaacccttcctgttt

SEQ ID NO: 3487 - RNA, 19 nt, synthetic construct
  source 1..19: mol_type = other RNA
ttagaacccttcctgtttt

SEQ ID NO: 3488 - RNA, 19 nt, synthetic construct
  source 1..19: mol_type = other RNA
tagaacccttcctgtttta

SEQ ID NO: 3489 - RNA, 19 nt, synthetic construct
  source 1..19: mol_type = other RNA
agaacccttcctgttttat

SEQ ID NO: 3490 - RNA, 19 nt, synthetic construct
  source 1..19: mol_type = other RNA
gaacccttcctgttttatg

SEQ ID NO: 3491 - RNA, 19 nt, synthetic construct
  source 1..19: mol_type = other RNA
aacccttcctgttttatgt

SEQ ID NO: 3492 - RNA, 19 nt, synthetic construct
  source 1..19: mol_type = other RNA
acccttcctgttttatgtc

SEQ ID NO: 3493 - RNA, 19 nt, synthetic construct
  source 1..19: mol_type = other RNA
cccttcctgttttatgtct

SEQ ID NO: 3494 - RNA, 19 nt, synthetic construct
  source 1..19: mol_type = other RNA
ccttcctgttttatgtctg

SEQ ID NO: 3495 - RNA, 19 nt, synthetic construct
  source 1..19: mol_type = other RNA
cttcctgttttatgtctgt

SEQ ID NO: 3496 - RNA, 19 nt, synthetic construct
  source 1..19: mol_type = other RNA
ttcctgttttatgtctgta

SEQ ID NO: 3497 - RNA, 19 nt, synthetic construct
  source 1..19: mol_type = other RNA
tcctgttttatgtctgtac

SEQ ID NO: 3498 - RNA, 19 nt, synthetic construct
  source 1..19: mol_type = other RNA
cctgttttatgtctgtacc

SEQ ID NO: 3499 - RNA, 19 nt, synthetic construct
  source 1..19: mol_type = other RNA
ctgttttatgtctgtacct

SEQ ID NO: 3500 - RNA, 19 nt, synthetic construct
  source 1..19: mol_type = other RNA
tgttttatgtctgtacctc

SEQ ID NO: 3501 - RNA, 19 nt, synthetic construct
  source 1..19: mol_type = other RNA
gttttatgtctgtacctcg

SEQ ID NO: 3502 - RNA, 19 nt, synthetic construct
  source 1..19: mol_type = other RNA
ttttatgtctgtacctcgt

SEQ ID NO: 3503 - RNA, 19 nt, synthetic construct
  source 1..19: mol_type = other RNA
tttatgtctgtacctcgtc

SEQ ID NO: 3504 - RNA, 19 nt, synthetic construct
  source 1..19: mol_type = other RNA
ttatgtctgtacctcgtcc

SEQ ID NO: 3505 - RNA, 19 nt, synthetic construct
  source 1..19: mol_type = other RNA
tatgtctgtacctcgtcca

SEQ ID NO: 3506 - RNA, 19 nt, synthetic construct
  source 1..19: mol_type = other RNA
atgtctgtacctcgtccac

SEQ ID NO: 3507 - RNA, 19 nt, synthetic construct
  source 1..19: mol_type = other RNA
tgtctgtacctcgtccacc

SEQ ID NO: 3508 - RNA, 19 nt, synthetic construct
  source 1..19: mol_type = other RNA
gtctgtacctcgtccaccc

SEQ ID NO: 3509 - RNA, 19 nt, synthetic construct
  source 1..19: mol_type = other RNA
tctgtacctcgtccacccc

SEQ ID NO: 3510 - RNA, 19 nt, synthetic construct
  source 1..19: mol_type = other RNA
ctgtacctcgtccacccct

SEQ ID NO: 3511 - RNA, 19 nt, synthetic construct
  source 1..19: mol_type = other RNA
tgtacctcgtccacccctc

SEQ ID NO: 3512 - RNA, 19 nt, synthetic construct
  source 1..19: mol_type = other RNA
gtacctcgtccacccctca

SEQ ID NO: 3513 - RNA, 19 nt, synthetic construct
  source 1..19: mol_type = other RNA
tacctcgtccacccctcag

SEQ ID NO: 3514 - RNA, 19 nt, synthetic construct
  source 1..19: mol_type = other RNA
acctcgtccacccctcagg

SEQ ID NO: 3515 - RNA, 19 nt, synthetic construct
  source 1..19: mol_type = other RNA
cctcgtccacccctcaggt

SEQ ID NO: 3516 - RNA, 19 nt, synthetic construct
  source 1..19: mol_type = other RNA
ctcgtccacccctcaggta

SEQ ID NO: 3517 - RNA, 19 nt, synthetic construct
  source 1..19: mol_type = other RNA
tcgtccacccctcaggtaa

SEQ ID NO: 3518 - RNA, 19 nt, synthetic construct
  source 1..19: mol_type = other RNA
cgtccacccctcaggtaat

SEQ ID NO: 3519 - RNA, 19 nt, synthetic construct
  source 1..19: mol_type = other RNA
gtccacccctcaggtaata

SEQ ID NO: 3520 - RNA, 19 nt, synthetic construct
  source 1..19: mol_type = other RNA
tccacccctcaggtaatac

SEQ ID NO: 3521 - RNA, 19 nt, synthetic construct
  source 1..19: mol_type = other RNA
ccacccctcaggtaatacc

SEQ ID NO: 3522 - RNA, 19 nt, synthetic construct
  source 1..19: mol_type = other RNA
cacccctcaggtaatacct

SEQ ID NO: 3523 - RNA, 19 nt, synthetic construct
  source 1..19: mol_type = other RNA
acccctcaggtaatacctg

SEQ ID NO: 3524 - RNA, 19 nt, synthetic construct
  source 1..19: mol_type = other RNA
cccctcaggtaatacctgc

SEQ ID NO: 3525 - RNA, 19 nt, synthetic construct
  source 1..19: mol_type = other RNA
ccctcaggtaatacctgcc

SEQ ID NO: 3526 - RNA, 19 nt, synthetic construct
  source 1..19: mol_type = other RNA
cctcaggtaatacctgcct

SEQ ID NO: 3527 - RNA, 19 nt, synthetic construct
  source 1..19: mol_type = other RNA
ctcaggtaatacctgcctc

SEQ ID NO: 3528 - RNA, 19 nt, synthetic construct
  source 1..19: mol_type = other RNA
tcaggtaatacctgcctct

SEQ ID NO: 3529 - RNA, 19 nt, synthetic construct
  source 1..19: mol_type = other RNA
caggtaatacctgcctctc

SEQ ID NO: 3530 - RNA, 19 nt, synthetic construct
  source 1..19: mol_type = other RNA
aggtaatacctgcctctca

SEQ ID NO: 3531 - RNA, 19 nt, synthetic construct
  source 1..19: mol_type = other RNA
ggtaatacctgcctctcac

SEQ ID NO: 3532 - RNA, 19 nt, synthetic construct
  source 1..19: mol_type = other RNA
gtaatacctgcctctcaca

SEQ ID NO: 3533 - RNA, 19 nt, synthetic construct
  source 1..19: mol_type = other RNA
taatacctgcctctcacag

SEQ ID NO: 3534 - RNA, 19 nt, synthetic construct
  source 1..19: mol_type = other RNA
aatacctgcctctcacagg

SEQ ID NO: 3535 - RNA, 19 nt, synthetic construct
  source 1..19: mol_type = other RNA
atacctgcctctcacaggt

SEQ ID NO: 3536 - RNA, 19 nt, synthetic construct
  source 1..19: mol_type = other RNA
tacctgcctctcacaggta

SEQ ID NO: 3537 - RNA, 19 nt, synthetic construct
  source 1..19: mol_type = other RNA
acctgcctctcacaggtac

SEQ ID NO: 3538 - RNA, 19 nt, synthetic construct
  source 1..19: mol_type = other RNA
cctgcctctcacaggtaca

SEQ ID NO: 3539 - RNA, 19 nt, synthetic construct
  source 1..19: mol_type = other RNA
ctgcctctcacaggtacag

SEQ ID NO: 3540 - RNA, 19 nt, synthetic construct
  source 1..19: mol_type = other RNA
tgcctctcacaggtacagc

SEQ ID NO: 3541 - RNA, 19 nt, synthetic construct
  source 1..19: mol_type = other RNA
gcctctcacaggtacagct

SEQ ID NO: 3542 - RNA, 19 nt, synthetic construct
  source 1..19: mol_type = other RNA
cctctcacaggtacagctg

SEQ ID NO: 3543 - RNA, 19 nt, synthetic construct
  source 1..19: mol_type = other RNA
ctctcacaggtacagctgt

SEQ ID NO: 3544 - RNA, 19 nt, synthetic construct
  source 1..19: mol_type = other RNA
tctcacaggtacagctgtt

SEQ ID NO: 3545 - RNA, 19 nt, synthetic construct
  source 1..19: mol_type = other RNA
ctcacaggtacagctgttt

SEQ ID NO: 3546 - RNA, 19 nt, synthetic construct
  source 1..19: mol_type = other RNA
tcacaggtacagctgtttc

SEQ ID NO: 3547 - RNA, 19 nt, synthetic construct
  source 1..19: mol_type = other RNA
cacaggtacagctgtttct

SEQ ID NO: 3548 - RNA, 19 nt, synthetic construct
  source 1..19: mol_type = other RNA
acaggtacagctgtttctt

SEQ ID NO: 3549 - RNA, 19 nt, synthetic construct
  source 1..19: mol_type = other RNA
caggtacagctgtttcttg

SEQ ID NO: 3550 - RNA, 19 nt, synthetic construct
  source 1..19: mol_type = other RNA
aggtacagctgtttcttgg

SEQ ID NO: 3551 - RNA, 19 nt, synthetic construct
  source 1..19: mol_type = other RNA
ggtacagctgtttcttgga

SEQ ID NO: 3552 - RNA, 19 nt, synthetic construct
  source 1..19: mol_type = other RNA
gtacagctgtttcttggaa

SEQ ID NO: 3553 - RNA, 19 nt, synthetic construct
  source 1..19: mol_type = other RNA
tacagctgtttcttggaaa

SEQ ID NO: 3554 - RNA, 19 nt, synthetic construct
  source 1..19: mol_type = other RNA
acagctgtttcttggaaat

SEQ ID NO: 3555 - RNA, 19 nt, synthetic construct
  source 1..19: mol_type = other RNA
cagctgtttcttggaaatc

SEQ ID NO: 3556 - RNA, 19 nt, synthetic construct
  source 1..19: mol_type = other RNA
agctgtttcttggaaatcc

SEQ ID NO: 3557 - RNA, 19 nt, synthetic construct
  source 1..19: mol_type = other RNA
gctgtttcttggaaatcct

SEQ ID NO: 3558 - RNA, 19 nt, synthetic construct
  source 1..19: mol_type = other RNA
ctgtttcttggaaatcctc

SEQ ID NO: 3559 - RNA, 19 nt, synthetic construct
  source 1..19: mol_type = other RNA
tgtttcttggaaatcctcc

SEQ ID NO: 3560 - RNA, 19 nt, synthetic construct
  source 1..19: mol_type = other RNA
gtttcttggaaatcctcca

SEQ ID NO: 3561 - RNA, 19 nt, synthetic construct
  source 1..19: mol_type = other RNA
tttcttggaaatcctccaa

SEQ ID NO: 3562 - RNA, 19 nt, synthetic construct
  source 1..19: mol_type = other RNA
ttcttggaaatcctccaac

SEQ ID NO: 3563 - RNA, 19 nt, synthetic construct
  source 1..19: mol_type = other RNA
tcttggaaatcctccaacc

SEQ ID NO: 3564 - RNA, 19 nt, synthetic construct
  source 1..19: mol_type = other RNA
cttggaaatcctccaacca

SEQ ID NO: 3565 - RNA, 19 nt, synthetic construct
  source 1..19: mol_type = other RNA
ttggaaatcctccaaccaa

SEQ ID NO: 3566 - RNA, 19 nt, synthetic construct
  source 1..19: mol_type = other RNA
tggaaatcctccaaccaaa

SEQ ID NO: 3567 - RNA, 19 nt, synthetic construct
  source 1..19: mol_type = other RNA
ggaaatcctccaaccaaat

SEQ ID NO: 3568 - RNA, 19 nt, synthetic construct
  source 1..19: mol_type = other RNA
gaaatcctccaaccaaata

SEQ ID NO: 3569 - RNA, 19 nt, synthetic construct
  source 1..19: mol_type = other RNA
aaatcctccaaccaaatag

SEQ ID NO: 3570 - RNA, 19 nt, synthetic construct
  source 1..19: mol_type = other RNA
aatcctccaaccaaatagc

SEQ ID NO: 3571 - RNA, 19 nt, synthetic construct
  source 1..19: mol_type = other RNA
atcctccaaccaaatagca

SEQ ID NO: 3572 - RNA, 19 nt, synthetic construct
  source 1..19: mol_type = other RNA
tcctccaaccaaatagcag

SEQ ID NO: 3573 - RNA, 19 nt, synthetic construct
  source 1..19: mol_type = other RNA
cctccaaccaaatagcagt

SEQ ID NO: 3574 - RNA, 19 nt, synthetic construct
  source 1..19: mol_type = other RNA
ctccaaccaaatagcagtt

SEQ ID NO: 3575 - RNA, 19 nt, synthetic construct
  source 1..19: mol_type = other RNA
tccaaccaaatagcagttt

SEQ ID NO: 3576 - RNA, 19 nt, synthetic construct
  source 1..19: mol_type = other RNA
ccaaccaaatagcagtttt

SEQ ID NO: 3577 - RNA, 19 nt, synthetic construct
  source 1..19: mol_type = other RNA
caaccaaatagcagttttc

SEQ ID NO: 3578 - RNA, 19 nt, synthetic construct
  source 1..19: mol_type = other RNA
aaccaaatagcagttttcc

SEQ ID NO: 3579 - RNA, 19 nt, synthetic construct
  source 1..19: mol_type = other RNA
accaaatagcagttttcct

SEQ ID NO: 3580 - RNA, 19 nt, synthetic construct
  source 1..19: mol_type = other RNA
ccaaatagcagttttccta

SEQ ID NO: 3581 - RNA, 19 nt, synthetic construct
  source 1..19: mol_type = other RNA
caaatagcagttttcctaa

SEQ ID NO: 3582 - RNA, 19 nt, synthetic construct
  source 1..19: mol_type = other RNA
aaatagcagttttcctaac

SEQ ID NO: 3583 - RNA, 19 nt, synthetic construct
  source 1..19: mol_type = other RNA
aatagcagttttcctaact

SEQ ID NO: 3584 - RNA, 19 nt, synthetic construct
  source 1..19: mol_type = other RNA
atagcagttttcctaactt

SEQ ID NO: 3585 - RNA, 19 nt, synthetic construct
  source 1..19: mol_type = other RNA
tagcagttttcctaacttg

SEQ ID NO: 3586 - RNA, 19 nt, synthetic construct
  source 1..19: mol_type = other RNA
agcagttttcctaacttga

SEQ ID NO: 3587 - RNA, 19 nt, synthetic construct
  source 1..19: mol_type = other RNA
gcagttttcctaacttgat

SEQ ID NO: 3588 - RNA, 19 nt, synthetic construct
  source 1..19: mol_type = other RNA
cagttttcctaacttgatt

SEQ ID NO: 3589 - RNA, 19 nt, synthetic construct
  source 1..19: mol_type = other RNA
agttttcctaacttgatta

SEQ ID NO: 3590 - RNA, 19 nt, synthetic construct
  source 1..19: mol_type = other RNA
gttttcctaacttgattag

SEQ ID NO: 3591 - RNA, 19 nt, synthetic construct
  source 1..19: mol_type = other RNA
ttttcctaacttgattagc

SEQ ID NO: 3592 - RNA, 19 nt, synthetic construct
  source 1..19: mol_type = other RNA
tttcctaacttgattagct

SEQ ID NO: 3593 - RNA, 19 nt, synthetic construct
  source 1..19: mol_type = other RNA
ttcctaacttgattagctt

SEQ ID NO: 3594 - RNA, 19 nt, synthetic construct
  source 1..19: mol_type = other RNA
tcctaacttgattagcttg

SEQ ID NO: 3595 - RNA, 19 nt, synthetic construct
  source 1..19: mol_type = other RNA
cctaacttgattagcttga

SEQ ID NO: 3596 - RNA, 19 nt, synthetic construct
  source 1..19: mol_type = other RNA
ctaacttgattagcttgag

SEQ ID NO: 3597 - RNA, 19 nt, synthetic construct
  source 1..19: mol_type = other RNA
taacttgattagcttgagc

SEQ ID NO: 3598 - RNA, 19 nt, synthetic construct
  source 1..19: mol_type = other RNA
aacttgattagcttgagct

SEQ ID NO: 3599 - RNA, 19 nt, synthetic construct
  source 1..19: mol_type = other RNA
acttgattagcttgagctg

SEQ ID NO: 3600 - RNA, 19 nt, synthetic construct
  source 1..19: mol_type = other RNA
cttgattagcttgagctga

SEQ ID NO: 3601 - RNA, 19 nt, synthetic construct
  source 1..19: mol_type = other RNA
ttgattagcttgagctgac

SEQ ID NO: 3602 - RNA, 19 nt, synthetic construct
  source 1..19: mol_type = other RNA
tgattagcttgagctgaca

SEQ ID NO: 3603 - RNA, 19 nt, synthetic construct
  source 1..19: mol_type = other RNA
gattagcttgagctgacag

SEQ ID NO: 3604 - RNA, 19 nt, synthetic construct
  source 1..19: mol_type = other RNA
attagcttgagctgacaga

SEQ ID NO: 3605 - RNA, 19 nt, synthetic construct
  source 1..19: mol_type = other RNA
ttagcttgagctgacagac

SEQ ID NO: 3606 - RNA, 19 nt, synthetic construct
  source 1..19: mol_type = other RNA
tagcttgagctgacagact

SEQ ID NO: 3607 - RNA, 19 nt, synthetic construct
  source 1..19: mol_type = other RNA
agcttgagctgacagactg

SEQ ID NO: 3608 - RNA, 19 nt, synthetic construct
  source 1..19: mol_type = other RNA
gcttgagctgacagactgt

SEQ ID NO: 3609 - RNA, 19 nt, synthetic construct
  source 1..19: mol_type = other RNA
cttgagctgacagactgtt

SEQ ID NO: 3610 - RNA, 19 nt, synthetic construct
  source 1..19: mol_type = other RNA
ttgagctgacagactgtta

SEQ ID NO: 3611 - RNA, 19 nt, synthetic construct
  source 1..19: mol_type = other RNA
tgagctgacagactgttag

SEQ ID NO: 3612 - RNA, 19 nt, synthetic construct
  source 1..19: mol_type = other RNA
gagctgacagactgttaga

SEQ ID NO: 3613 - RNA, 19 nt, synthetic construct
  source 1..19: mol_type = other RNA
agctgacagactgttagaa

SEQ ID NO: 3614 - RNA, 19 nt, synthetic construct
  source 1..19: mol_type = other RNA
gctgacagactgttagaat

SEQ ID NO: 3615 - RNA, 19 nt, synthetic construct
  source 1..19: mol_type = other RNA
ctgacagactgttagaata

SEQ ID NO: 3616 - RNA, 19 nt, synthetic construct
  source 1..19: mol_type = other RNA
tgacagactgttagaatac

SEQ ID NO: 3617 - RNA, 19 nt, synthetic construct
  source 1..19: mol_type = other RNA
gacagactgttagaataca

SEQ ID NO: 3618 - RNA, 19 nt, synthetic construct
  source 1..19: mol_type = other RNA
acagactgttagaatacag

SEQ ID NO: 3619 - RNA, 19 nt, synthetic construct
  source 1..19: mol_type = other RNA
cagactgttagaatacagt

SEQ ID NO: 3620 - RNA, 19 nt, synthetic construct
  source 1..19: mol_type = other RNA
agactgttagaatacagtt

SEQ ID NO: 3621 - RNA, 19 nt, synthetic construct
  source 1..19: mol_type = other RNA
gactgttagaatacagttc

SEQ ID NO: 3622 - RNA, 19 nt, synthetic construct
  source 1..19: mol_type = other RNA
actgttagaatacagttct

SEQ ID NO: 3623 - RNA, 19 nt, synthetic construct
  source 1..19: mol_type = other RNA
ctgttagaatacagttctc

SEQ ID NO: 3624 - RNA, 19 nt, synthetic construct
  source 1..19: mol_type = other RNA
tgttagaatacagttctct

SEQ ID NO: 3625 - RNA, 19 nt, synthetic construct
  source 1..19: mol_type = other RNA
gttagaatacagttctctg

SEQ ID NO: 3626 - RNA, 19 nt, synthetic construct
  source 1..19: mol_type = other RNA
ttagaatacagttctctgg

SEQ ID NO: 3627 - RNA, 19 nt, synthetic construct
  source 1..19: mol_type = other RNA
tagaatacagttctctggc

SEQ ID NO: 3628 - RNA, 19 nt, synthetic construct
  source 1..19: mol_type = other RNA
agaatacagttctctggcc

SEQ ID NO: 3629 - RNA, 19 nt, synthetic construct
  source 1..19: mol_type = other RNA
gaatacagttctctggcca

SEQ ID NO: 3630 - RNA, 19 nt, synthetic construct
  source 1..19: mol_type = other RNA
aatacagttctctggccac

SEQ ID NO: 3631 - RNA, 19 nt, synthetic construct
  source 1..19: mol_type = other RNA
atacagttctctggccaca

SEQ ID NO: 3632 - RNA, 19 nt, synthetic construct
  source 1..19: mol_type = other RNA
tacagttctctggccacag

SEQ ID NO: 3633 - RNA, 19 nt, synthetic construct
  source 1..19: mol_type = other RNA
acagttctctggccacagc

SEQ ID NO: 3634 - RNA, 19 nt, synthetic construct
  source 1..19: mol_type = other RNA
cagttctctggccacagct

SEQ ID NO: 3635 - RNA, 19 nt, synthetic construct
  source 1..19: mol_type = other RNA
agttctctggccacagctg

SEQ ID NO: 3636 - RNA, 19 nt, synthetic construct
  source 1..19: mol_type = other RNA
gttctctggccacagctga

SEQ ID NO: 3637 - RNA, 19 nt, synthetic construct
  source 1..19: mol_type = other RNA
ttctctggccacagctgat

SEQ ID NO: 3638 - RNA, 19 nt, synthetic construct
  source 1..19: mol_type = other RNA
tctctggccacagctgatg

SEQ ID NO: 3639 - RNA, 19 nt, synthetic construct
  source 1..19: mol_type = other RNA
ctctggccacagctgatga

SEQ ID NO: 3640 - RNA, 19 nt, synthetic construct
  source 1..19: mol_type = other RNA
tctggccacagctgatgag

SEQ ID NO: 3641 - RNA, 19 nt, synthetic construct
  source 1..19: mol_type = other RNA
ctggccacagctgatgagg

SEQ ID NO: 3642 - RNA, 19 nt, synthetic construct
  source 1..19: mol_type = other RNA
tggccacagctgatgaggg

SEQ ID NO: 3643 - RNA, 19 nt, synthetic construct
  source 1..19: mol_type = other RNA
ggccacagctgatgagggc

SEQ ID NO: 3644 - RNA, 19 nt, synthetic construct
  source 1..19: mol_type = other RNA
gccacagctgatgagggct

SEQ ID NO: 3645 - RNA, 19 nt, synthetic construct
  source 1..19: mol_type = other RNA
ccacagctgatgagggctt

SEQ ID NO: 3646 - RNA, 19 nt, synthetic construct
  source 1..19: mol_type = other RNA
cacagctgatgagggcttt

SEQ ID NO: 3647 - RNA, 19 nt, synthetic construct
  source 1..19: mol_type = other RNA
acagctgatgagggctttc

SEQ ID NO: 3648 - RNA, 19 nt, synthetic construct
  source 1..19: mol_type = other RNA
cagctgatgagggctttct

SEQ ID NO: 3649 - RNA, 19 nt, synthetic construct
  source 1..19: mol_type = other RNA
agctgatgagggctttctg

SEQ ID NO: 3650 - RNA, 19 nt, synthetic construct
  source 1..19: mol_type = other RNA
gctgatgagggctttctgt

SEQ ID NO: 3651 - RNA, 19 nt, synthetic construct
  source 1..19: mol_type = other RNA
ctgatgagggctttctgta

SEQ ID NO: 3652 - RNA, 19 nt, synthetic construct
  source 1..19: mol_type = other RNA
tgatgagggctttctgtac

SEQ ID NO: 3653 - RNA, 19 nt, synthetic construct
  source 1..19: mol_type = other RNA
gatgagggctttctgtact

SEQ ID NO: 3654 - RNA, 19 nt, synthetic construct
  source 1..19: mol_type = other RNA
atgagggctttctgtactg

SEQ ID NO: 3655 - RNA, 19 nt, synthetic construct
  source 1..19: mol_type = other RNA
tgagggctttctgtactgc

SEQ ID NO: 3656 - RNA, 19 nt, synthetic construct
  source 1..19: mol_type = other RNA
gagggctttctgtactgca

SEQ ID NO: 3657 - RNA, 19 nt, synthetic construct
  source 1..19: mol_type = other RNA
agggctttctgtactgcac

SEQ ID NO: 3658 - RNA, 19 nt, synthetic construct
  source 1..19: mol_type = other RNA
gggctttctgtactgcaca

SEQ ID NO: 3659 - RNA, 19 nt, synthetic construct
  source 1..19: mol_type = other RNA
ggctttctgtactgcacac

SEQ ID NO: 3660 - RNA, 19 nt, synthetic construct
  source 1..19: mol_type = other RNA
gctttctgtactgcacaca

SEQ ID NO: 3661 - RNA, 19 nt, synthetic construct
  source 1..19: mol_type = other RNA
ctttctgtactgcacacag

SEQ ID NO: 3662 - RNA, 19 nt, synthetic construct
  source 1..19: mol_type = other RNA
tttctgtactgcacacaga

SEQ ID NO: 3663 - RNA, 19 nt, synthetic construct
  source 1..19: mol_type = other RNA
ttctgtactgcacacagat

SEQ ID NO: 3664 - RNA, 19 nt, synthetic construct
  source 1..19: mol_type = other RNA
tctgtactgcacacagatt

SEQ ID NO: 3665 - RNA, 19 nt, synthetic construct
  source 1..19: mol_type = other RNA
ctgtactgcacacagattg

SEQ ID NO: 3666 - RNA, 19 nt, synthetic construct
  source 1..19: mol_type = other RNA
tgtactgcacacagattgt

SEQ ID NO: 3667 - RNA, 19 nt, synthetic construct
  source 1..19: mol_type = other RNA
gtactgcacacagattgtg

SEQ ID NO: 3668 - RNA, 19 nt, synthetic construct
  source 1..19: mol_type = other RNA
tactgcacacagattgtgt

SEQ ID NO: 3669 - RNA, 19 nt, synthetic construct
  source 1..19: mol_type = other RNA
actgcacacagattgtgta

SEQ ID NO: 3670 - RNA, 19 nt, synthetic construct
  source 1..19: mol_type = other RNA
ctgcacacagattgtgtac

SEQ ID NO: 3671 - RNA, 19 nt, synthetic construct
  source 1..19: mol_type = other RNA
tgcacacagattgtgtact

SEQ ID NO: 3672 - RNA, 19 nt, synthetic construct
  source 1..19: mol_type = other RNA
gcacacagattgtgtactg

SEQ ID NO: 3673 - RNA, 19 nt, synthetic construct
  source 1..19: mol_type = other RNA
cacacagattgtgtactgc

SEQ ID NO: 3674 - RNA, 19 nt, synthetic construct
  source 1..19: mol_type = other RNA
acacagattgtgtactgca

SEQ ID NO: 3675 - RNA, 19 nt, synthetic construct
  source 1..19: mol_type = other RNA
cacagattgtgtactgcac

SEQ ID NO: 3676 - RNA, 19 nt, synthetic construct
  source 1..19: mol_type = other RNA
acagattgtgtactgcacc

SEQ ID NO: 3677 - RNA, 19 nt, synthetic construct
  source 1..19: mol_type = other RNA
cagattgtgtactgcaccc

SEQ ID NO: 3678 - RNA, 19 nt, synthetic construct
  source 1..19: mol_type = other RNA
agattgtgtactgcacccc

SEQ ID NO: 3679 - RNA, 19 nt, synthetic construct
  source 1..19: mol_type = other RNA
gattgtgtactgcacccca

SEQ ID NO: 3680 - RNA, 19 nt, synthetic construct
  source 1..19: mol_type = other RNA
attgtgtactgcaccccag

SEQ ID NO: 3681 - RNA, 19 nt, synthetic construct
  source 1..19: mol_type = other RNA
ttgtgtactgcaccccagt

SEQ ID NO: 3682 - RNA, 19 nt, synthetic construct
  source 1..19: mol_type = other RNA
tgtgtactgcaccccagtc

SEQ ID NO: 3683 - RNA, 19 nt, synthetic construct
  source 1..19: mol_type = other RNA
gtgtactgcaccccagtcc

SEQ ID NO: 3684 - RNA, 19 nt, synthetic construct
  source 1..19: mol_type = other RNA
tgtactgcaccccagtcca

SEQ ID NO: 3685 - RNA, 19 nt, synthetic construct
  source 1..19: mol_type = other RNA
gtactgcaccccagtccag

SEQ ID NO: 3686 - RNA, 19 nt, synthetic construct
  source 1..19: mol_type = other RNA
tactgcaccccagtccagg

SEQ ID NO: 3687 - RNA, 19 nt, synthetic construct
  source 1..19: mol_type = other RNA
actgcaccccagtccaggt

SEQ ID NO: 3688 - RNA, 19 nt, synthetic construct
  source 1..19: mol_type = other RNA
ctgcaccccagtccaggtg

SEQ ID NO: 3689 - RNA, 19 nt, synthetic construct
  source 1..19: mol_type = other RNA
tgcaccccagtccaggtga

SEQ ID NO: 3690 - RNA, 19 nt, synthetic construct
  source 1..19: mol_type = other RNA
gcaccccagtccaggtgac

SEQ ID NO: 3691 - RNA, 19 nt, synthetic construct
  source 1..19: mol_type = other RNA
caccccagtccaggtgact

SEQ ID NO: 3692 - RNA, 19 nt, synthetic construct
  source 1..19: mol_type = other RNA
accccagtccaggtgactg

SEQ ID NO: 3693 - RNA, 19 nt, synthetic construct
  source 1..19: mol_type = other RNA
ccccagtccaggtgactgg

SEQ ID NO: 3694 - RNA, 19 nt, synthetic construct
  source 1..19: mol_type = other RNA
cccagtccaggtgactggt

SEQ ID NO: 3695 - RNA, 19 nt, synthetic construct
  source 1..19: mol_type = other RNA
ccagtccaggtgactggta

SEQ ID NO: 3696 - RNA, 19 nt, synthetic construct
  source 1..19: mol_type = other RNA
cagtccaggtgactggtac

SEQ ID NO: 3697 - RNA, 19 nt, synthetic construct
  source 1..19: mol_type = other RNA
agtccaggtgactggtacc

SEQ ID NO: 3698 - RNA, 19 nt, synthetic construct
  source 1..19: mol_type = other RNA
gtccaggtgactggtaccc

SEQ ID NO: 3699 - RNA, 19 nt, synthetic construct
  source 1..19: mol_type = other RNA
tccaggtgactggtaccca

SEQ ID NO: 3700 - RNA, 19 nt, synthetic construct
  source 1..19: mol_type = other RNA
ccaggtgactggtacccac

SEQ ID NO: 3701 - RNA, 19 nt, synthetic construct
  source 1..19: mol_type = other RNA
caggtgactggtacccact

SEQ ID NO: 3702 - RNA, 19 nt, synthetic construct
  source 1..19: mol_type = other RNA
aggtgactggtacccactc

SEQ ID NO: 3703 - RNA, 19 nt, synthetic construct
  source 1..19: mol_type = other RNA
ggtgactggtacccactcg

SEQ ID NO: 3704 - RNA, 19 nt, synthetic construct
  source 1..19: mol_type = other RNA
gtgactggtacccactcga

SEQ ID NO: 3705 - RNA, 19 nt, synthetic construct
  source 1..19: mol_type = other RNA
tgactggtacccactcgag

SEQ ID NO: 3706 - RNA, 19 nt, synthetic construct
  source 1..19: mol_type = other RNA
gactggtacccactcgagt

SEQ ID NO: 3707 - RNA, 19 nt, synthetic construct
  source 1..19: mol_type = other RNA
actggtacccactcgagtt

SEQ ID NO: 3708 - RNA, 19 nt, synthetic construct
  source 1..19: mol_type = other RNA
ctggtacccactcgagttg

SEQ ID NO: 3709 - RNA, 19 nt, synthetic construct
  source 1..19: mol_type = other RNA
tggtacccactcgagttgt

SEQ ID NO: 3710 - RNA, 19 nt, synthetic construct
  source 1..19: mol_type = other RNA
ggtacccactcgagttgtg

SEQ ID NO: 3711 - RNA, 19 nt, synthetic construct
  source 1..19: mol_type = other RNA
gtacccactcgagttgtgc

SEQ ID NO: 3712 - RNA, 19 nt, synthetic construct
  source 1..19: mol_type = other RNA
tacccactcgagttgtgcc

SEQ ID NO: 3713 - RNA, 19 nt, synthetic construct
  source 1..19: mol_type = other RNA
acccactcgagttgtgccg

SEQ ID NO: 3714 - RNA, 19 nt, synthetic construct
  source 1..19: mol_type = other RNA
cccactcgagttgtgccgt

SEQ ID NO: 3715 - RNA, 19 nt, synthetic construct
  source 1..19: mol_type = other RNA
ccactcgagttgtgccgtg

SEQ ID NO: 3716 - RNA, 19 nt, synthetic construct
  source 1..19: mol_type = other RNA
cactcgagttgtgccgtgc

SEQ ID NO: 3717 - RNA, 19 nt, synthetic construct
  source 1..19: mol_type = other RNA
actcgagttgtgccgtgca

SEQ ID NO: 3718 - RNA, 19 nt, synthetic construct
  source 1..19: mol_type = other RNA
ctcgagttgtgccgtgcac

SEQ ID NO: 3719 - RNA, 19 nt, synthetic construct
  source 1..19: mol_type = other RNA
tcgagttgtgccgtgcaca

SEQ ID NO: 3720 - RNA, 19 nt, synthetic construct
  source 1..19: mol_type = other RNA
cgagttgtgccgtgcacaa

SEQ ID NO: 3721 - RNA, 19 nt, synthetic construct
  source 1..19: mol_type = other RNA
gagttgtgccgtgcacaac

SEQ ID NO: 3722 - RNA, 19 nt, synthetic construct
  source 1..19: mol_type = other RNA
agttgtgccgtgcacaacc

SEQ ID NO: 3723 - RNA, 19 nt, synthetic construct
  source 1..19: mol_type = other RNA
gttgtgccgtgcacaacct

SEQ ID NO: 3724 - RNA, 19 nt, synthetic construct
  source 1..19: mol_type = other RNA
ttgtgccgtgcacaacctg

SEQ ID NO: 3725 - RNA, 19 nt, synthetic construct
  source 1..19: mol_type = other RNA
tgtgccgtgcacaacctgt

SEQ ID NO: 3726 - RNA, 19 nt, synthetic construct
  source 1..19: mol_type = other RNA
gtgccgtgcacaacctgtc

SEQ ID NO: 3727 - RNA, 19 nt, synthetic construct
  source 1..19: mol_type = other RNA
tgccgtgcacaacctgtcc

SEQ ID NO: 3728 - RNA, 19 nt, synthetic construct
  source 1..19: mol_type = other RNA
gccgtgcacaacctgtcca

SEQ ID NO: 3729 - RNA, 19 nt, synthetic construct
  source 1..19: mol_type = other RNA
ccgtgcacaacctgtccag

SEQ ID NO: 3730 - RNA, 19 nt, synthetic construct
  source 1..19: mol_type = other RNA
cgtgcacaacctgtccagt

SEQ ID NO: 3731 - RNA, 19 nt, synthetic construct
  source 1..19: mol_type = other RNA
gtgcacaacctgtccagta

SEQ ID NO: 3732 - RNA, 19 nt, synthetic construct
  source 1..19: mol_type = other RNA
tgcacaacctgtccagtat

SEQ ID NO: 3733 - RNA, 19 nt, synthetic construct
  source 1..19: mol_type = other RNA
gcacaacctgtccagtata

SEQ ID NO: 3734 - RNA, 19 nt, synthetic construct
  source 1..19: mol_type = other RNA
cacaacctgtccagtatat

SEQ ID NO: 3735 - RNA, 19 nt, synthetic construct
  source 1..19: mol_type = other RNA
acaacctgtccagtatatg

SEQ ID NO: 3736 - RNA, 19 nt, synthetic construct
  source 1..19: mol_type = other RNA
caacctgtccagtatatgc

SEQ ID NO: 3737 - RNA, 19 nt, synthetic construct
  source 1..19: mol_type = other RNA
aacctgtccagtatatgca

SEQ ID NO: 3738 - RNA, 19 nt, synthetic construct
  source 1..19: mol_type = other RNA
acctgtccagtatatgcat

SEQ ID NO: 3739 - RNA, 19 nt, synthetic construct
  source 1..19: mol_type = other RNA
cctgtccagtatatgcatg

SEQ ID NO: 3740 - RNA, 19 nt, synthetic construct
  source 1..19: mol_type = other RNA
ctgtccagtatatgcatgt

SEQ ID NO: 3741 - RNA, 19 nt, synthetic construct
  source 1..19: mol_type = other RNA
tgtccagtatatgcatgtg

SEQ ID NO: 3742 - RNA, 19 nt, synthetic construct
  source 1..19: mol_type = other RNA
gtccagtatatgcatgtgg

SEQ ID NO: 3743 - RNA, 19 nt, synthetic construct
  source 1..19: mol_type = other RNA
tccagtatatgcatgtggt

SEQ ID NO: 3744 - RNA, 19 nt, synthetic construct
  source 1..19: mol_type = other RNA
ccagtatatgcatgtggtg

SEQ ID NO: 3745 - RNA, 19 nt, synthetic construct
  source 1..19: mol_type = other RNA
cagtatatgcatgtggtgg

SEQ ID NO: 3746 - RNA, 19 nt, synthetic construct
  source 1..19: mol_type = other RNA
agtatatgcatgtggtggc

SEQ ID NO: 3747 - RNA, 19 nt, synthetic construct
  source 1..19: mol_type = other RNA
gtatatgcatgtggtggcc

SEQ ID NO: 3748 - RNA, 19 nt, synthetic construct
  source 1..19: mol_type = other RNA
tatatgcatgtggtggccc

SEQ ID NO: 3749 - RNA, 19 nt, synthetic construct
  source 1..19: mol_type = other RNA
atatgcatgtggtggccct

SEQ ID NO: 3750 - RNA, 19 nt, synthetic construct
  source 1..19: mol_type = other RNA
tatgcatgtggtggcccta

SEQ ID NO: 3751 - RNA, 19 nt, synthetic construct
  source 1..19: mol_type = other RNA
atgcatgtggtggccctac

SEQ ID NO: 3752 - RNA, 19 nt, synthetic construct
  source 1..19: mol_type = other RNA
tgcatgtggtggccctact

SEQ ID NO: 3753 - RNA, 19 nt, synthetic construct
  source 1..19: mol_type = other RNA
gcatgtggtggccctactg

SEQ ID NO: 3754 - RNA, 19 nt, synthetic construct
  source 1..19: mol_type = other RNA
catgtggtggccctactga

SEQ ID NO: 3755 - RNA, 19 nt, synthetic construct
  source 1..19: mol_type = other RNA
atgtggtggccctactgac

SEQ ID NO: 3756 - RNA, 19 nt, synthetic construct
  source 1..19: mol_type = other RNA
tgtggtggccctactgact

SEQ ID NO: 3757 - RNA, 19 nt, synthetic construct
  source 1..19: mol_type = other RNA
gtggtggccctactgactg

SEQ ID NO: 3758 - RNA, 19 nt, synthetic construct
  source 1..19: mol_type = other RNA
tggtggccctactgactgg

SEQ ID NO: 3759 - RNA, 19 nt, synthetic construct
  source 1..19: mol_type = other RNA
ggtggccctactgactggt

SEQ ID NO: 3760 - RNA, 19 nt, synthetic construct
  source 1..19: mol_type = other RNA
gtggccctactgactggta

SEQ ID NO: 3761 - RNA, 19 nt, synthetic construct
  source 1..19: mol_type = other RNA
tggccctactgactggtaa

SEQ ID NO: 3762 - RNA, 19 nt, synthetic construct
  source 1..19: mol_type = other RNA
ggccctactgactggtaat

SEQ ID NO: 3763 - RNA, 19 nt, synthetic construct
  source 1..19: mol_type = other RNA
gccctactgactggtaatg

SEQ ID NO: 3764 - RNA, 19 nt, synthetic construct
  source 1..19: mol_type = other RNA
ccctactgactggtaatgg

SEQ ID NO: 3765 - RNA, 19 nt, synthetic construct
  source 1..19: mol_type = other RNA
cctactgactggtaatggt

SEQ ID NO: 3766 - RNA, 19 nt, synthetic construct
  source 1..19: mol_type = other RNA
ctactgactggtaatggtt

SEQ ID NO: 3767 - RNA, 19 nt, synthetic construct
  source 1..19: mol_type = other RNA
tactgactggtaatggtta

SEQ ID NO: 3768 - RNA, 19 nt, synthetic construct
  source 1..19: mol_type = other RNA
actgactggtaatggttag

SEQ ID NO: 3769 - RNA, 19 nt, synthetic construct
  source 1..19: mol_type = other RNA
ctgactggtaatggttaga

SEQ ID NO: 3770 - RNA, 19 nt, synthetic construct
  source 1..19: mol_type = other RNA
tgactggtaatggttagag

SEQ ID NO: 3771 - RNA, 19 nt, synthetic construct
  source 1..19: mol_type = other RNA
gactggtaatggttagagg

SEQ ID NO: 3772 - RNA, 19 nt, synthetic construct
  source 1..19: mol_type = other RNA
actggtaatggttagaggc

SEQ ID NO: 3773 - RNA, 19 nt, synthetic construct
  source 1..19: mol_type = other RNA
ctggtaatggttagaggca

SEQ ID NO: 3774 - RNA, 19 nt, synthetic construct
  source 1..19: mol_type = other RNA
tggtaatggttagaggcat

SEQ ID NO: 3775 - RNA, 19 nt, synthetic construct
  source 1..19: mol_type = other RNA
ggtaatggttagaggcatt

SEQ ID NO: 3776 - RNA, 19 nt, synthetic construct
  source 1..19: mol_type = other RNA
gtaatggttagaggcattt

SEQ ID NO: 3777 - RNA, 19 nt, synthetic construct
  source 1..19: mol_type = other RNA
taatggttagaggcattta

SEQ ID NO: 3778 - RNA, 19 nt, synthetic construct
  source 1..19: mol_type = other RNA
aatggttagaggcatttat

SEQ ID NO: 3779 - RNA, 19 nt, synthetic construct
  source 1..19: mol_type = other RNA
atggttagaggcatttatg

SEQ ID NO: 3780 - RNA, 19 nt, synthetic construct
  source 1..19: mol_type = other RNA
tggttagaggcatttatgg

SEQ ID NO: 3781 - RNA, 19 nt, synthetic construct
  source 1..19: mol_type = other RNA
ggttagaggcatttatgga

SEQ ID NO: 3782 - RNA, 19 nt, synthetic construct
  source 1..19: mol_type = other RNA
gttagaggcatttatggat

SEQ ID NO: 3783 - RNA, 19 nt, synthetic construct
  source 1..19: mol_type = other RNA
ttagaggcatttatggatt

SEQ ID NO: 3784 - RNA, 19 nt, synthetic construct
  source 1..19: mol_type = other RNA
tagaggcatttatggattt

SEQ ID NO: 3785 - RNA, 19 nt, synthetic construct
  source 1..19: mol_type = other RNA
agaggcatttatggatttt

SEQ ID NO: 3786 - RNA, 19 nt, synthetic construct
  source 1..19: mol_type = other RNA
gaggcatttatggattttt

SEQ ID NO: 3787 - RNA, 19 nt, synthetic construct
  source 1..19: mol_type = other RNA
aggcatttatggattttta

SEQ ID NO: 3788 - RNA, 19 nt, synthetic construct
  source 1..19: mol_type = other RNA
ggcatttatggatttttag

SEQ ID NO: 3789 - RNA, 19 nt, synthetic construct
  source 1..19: mol_type = other RNA
gcatttatggatttttagc

SEQ ID NO: 3790 - RNA, 19 nt, synthetic construct
  source 1..19: mol_type = other RNA
catttatggatttttagct

SEQ ID NO: 3791 - RNA, 19 nt, synthetic construct
  source 1..19: mol_type = other RNA
atttatggatttttagctt

SEQ ID NO: 3792 - RNA, 19 nt, synthetic construct
  source 1..19: mol_type = other RNA
tttatggatttttagcttt

SEQ ID NO: 3793 - RNA, 19 nt, synthetic construct
  source 1..19: mol_type = other RNA
ttatggatttttagctttg

SEQ ID NO: 3794 - RNA, 19 nt, synthetic construct
  source 1..19: mol_type = other RNA
tatggatttttagctttga

SEQ ID NO: 3795 - RNA, 19 nt, synthetic construct
  source 1..19: mol_type = other RNA
atggatttttagctttgag

SEQ ID NO: 3796 - RNA, 19 nt, synthetic construct
  source 1..19: mol_type = other RNA
tggatttttagctttgagg

SEQ ID NO: 3797 - RNA, 19 nt, synthetic construct
  source 1..19: mol_type = other RNA
ggatttttagctttgagga

SEQ ID NO: 3798 - RNA, 19 nt, synthetic construct
  source 1..19: mol_type = other RNA
gatttttagctttgaggaa

SEQ ID NO: 3799 - RNA, 19 nt, synthetic construct
  source 1..19: mol_type = other RNA
atttttagctttgaggaaa

SEQ ID NO: 3800 - RNA, 19 nt, synthetic construct
  source 1..19: mol_type = other RNA
tttttagctttgaggaaaa

SEQ ID NO: 3801 - RNA, 19 nt, synthetic construct
  source 1..19: mol_type = other RNA
ttttagctttgaggaaaaa

SEQ ID NO: 3802 - RNA, 19 nt, synthetic construct
  source 1..19: mol_type = other RNA
tttagctttgaggaaaaac

SEQ ID NO: 3803 - RNA, 19 nt, synthetic construct
  source 1..19: mol_type = other RNA
ttagctttgaggaaaaacc

SEQ ID NO: 3804 - RNA, 19 nt, synthetic construct
  source 1..19: mol_type = other RNA
tagctttgaggaaaaacca

SEQ ID NO: 3805 - RNA, 19 nt, synthetic construct
  source 1..19: mol_type = other RNA
agctttgaggaaaaaccat

SEQ ID NO: 3806 - RNA, 19 nt, synthetic construct
  source 1..19: mol_type = other RNA
gctttgaggaaaaaccatg

SEQ ID NO: 3807 - RNA, 19 nt, synthetic construct
  source 1..19: mol_type = other RNA
ctttgaggaaaaaccatga

SEQ ID NO: 3808 - RNA, 19 nt, synthetic construct
  source 1..19: mol_type = other RNA
tttgaggaaaaaccatgac

SEQ ID NO: 3809 - RNA, 19 nt, synthetic construct
  source 1..19: mol_type = other RNA
ttgaggaaaaaccatgact

SEQ ID NO: 3810 - RNA, 19 nt, synthetic construct
  source 1..19: mol_type = other RNA
tgaggaaaaaccatgactt

SEQ ID NO: 3811 - RNA, 19 nt, synthetic construct
  source 1..19: mol_type = other RNA
gaggaaaaaccatgacttt

SEQ ID NO: 3812 - RNA, 19 nt, synthetic construct
  source 1..19: mol_type = other RNA
aggaaaaaccatgactttt

SEQ ID NO: 3813 - RNA, 19 nt, synthetic construct
  source 1..19: mol_type = other RNA
ggaaaaaccatgactttta

SEQ ID NO: 3814 - RNA, 19 nt, synthetic construct
  source 1..19: mol_type = other RNA
gaaaaaccatgacttttaa

SEQ ID NO: 3815 - RNA, 19 nt, synthetic construct
  source 1..19: mol_type = other RNA
aaaaaccatgacttttaac

SEQ ID NO: 3816 - RNA, 19 nt, synthetic construct
  source 1..19: mol_type = other RNA
aaaaccatgacttttaaca

SEQ ID NO: 3817 - RNA, 19 nt, synthetic construct
  source 1..19: mol_type = other RNA
aaaccatgacttttaacaa

SEQ ID NO: 3818 - RNA, 19 nt, synthetic construct
  source 1..19: mol_type = other RNA
aaccatgacttttaacaaa

SEQ ID NO: 3819 - RNA, 19 nt, synthetic construct
  source 1..19: mol_type = other RNA
accatgacttttaacaaat

SEQ ID NO: 3820 - RNA, 19 nt, synthetic construct
  source 1..19: mol_type = other RNA
ccatgacttttaacaaatt

SEQ ID NO: 3821 - RNA, 19 nt, synthetic construct
  source 1..19: mol_type = other RNA
catgacttttaacaaattt

SEQ ID NO: 3822 - RNA, 19 nt, synthetic construct
  source 1..19: mol_type = other RNA
atgacttttaacaaatttt

SEQ ID NO: 3823 - RNA, 19 nt, synthetic construct
  source 1..19: mol_type = other RNA
tgacttttaacaaattttt

SEQ ID NO: 3824 - RNA, 19 nt, synthetic construct
  source 1..19: mol_type = other RNA
gacttttaacaaattttta

SEQ ID NO: 3825 - RNA, 19 nt, synthetic construct
  source 1..19: mol_type = other RNA
acttttaacaaatttttat

SEQ ID NO: 3826 - RNA, 19 nt, synthetic construct
  source 1..19: mol_type = other RNA
cttttaacaaatttttatg

SEQ ID NO: 3827 - RNA, 19 nt, synthetic construct
  source 1..19: mol_type = other RNA
ttttaacaaatttttatgg

SEQ ID NO: 3828 - RNA, 19 nt, synthetic construct
  source 1..19: mol_type = other RNA
tttaacaaatttttatggg

SEQ ID NO: 3829 - RNA, 19 nt, synthetic construct
  source 1..19: mol_type = other RNA
ttaacaaatttttatgggt

SEQ ID NO: 3830 - RNA, 19 nt, synthetic construct
  source 1..19: mol_type = other RNA
taacaaatttttatgggtt

SEQ ID NO: 3831 - RNA, 19 nt, synthetic construct
  source 1..19: mol_type = other RNA
aacaaatttttatgggtta

SEQ ID NO: 3832 - RNA, 19 nt, synthetic construct
  source 1..19: mol_type = other RNA
acaaatttttatgggttat

SEQ ID NO: 3833 - RNA, 19 nt, synthetic construct
  source 1..19: mol_type = other RNA
caaatttttatgggttata

SEQ ID NO: 3834 - RNA, 19 nt, synthetic construct
  source 1..19: mol_type = other RNA
aaatttttatgggttatat

SEQ ID NO: 3835 - RNA, 19 nt, synthetic construct
  source 1..19: mol_type = other RNA
aatttttatgggttatatg

SEQ ID NO: 3836 - RNA, 19 nt, synthetic construct
  source 1..19: mol_type = other RNA
atttttatgggttatatgc

SEQ ID NO: 3837 - RNA, 19 nt, synthetic construct
  source 1..19: mol_type = other RNA
tttttatgggttatatgcc

SEQ ID NO: 3838 - RNA, 19 nt, synthetic construct
  source 1..19: mol_type = other RNA
ttttatgggttatatgcct

SEQ ID NO: 3839 - RNA, 19 nt, synthetic construct
  source 1..19: mol_type = other RNA
tttatgggttatatgccta

SEQ ID NO: 3840 - RNA, 19 nt, synthetic construct
  source 1..19: mol_type = other RNA
ttatgggttatatgcctaa

SEQ ID NO: 3841 - RNA, 19 nt, synthetic construct
  source 1..19: mol_type = other RNA
tatgggttatatgcctaaa

SEQ ID NO: 3842 - RNA, 19 nt, synthetic construct
  source 1..19: mol_type = other RNA
atgggttatatgcctaaac

SEQ ID NO: 3843 - RNA, 19 nt, synthetic construct
  source 1..19: mol_type = other RNA
tgggttatatgcctaaacc

SEQ ID NO: 3844 - RNA, 19 nt, synthetic construct
  source 1..19: mol_type = other RNA
gggttatatgcctaaaccc

SEQ ID NO: 3845 - RNA, 19 nt, synthetic construct
  source 1..19: mol_type = other RNA
ggttatatgcctaaaccct

SEQ ID NO: 3846 - RNA, 19 nt, synthetic construct
  source 1..19: mol_type = other RNA
gttatatgcctaaaccctt

SEQ ID NO: 3847 - RNA, 19 nt, synthetic construct
  source 1..19: mol_type = other RNA
ttatatgcctaaaccctta

SEQ ID NO: 3848 - RNA, 19 nt, synthetic construct
  source 1..19: mol_type = other RNA
tatatgcctaaacccttat

SEQ ID NO: 3849 - RNA, 19 nt, synthetic construct
  source 1..19: mol_type = other RNA
atatgcctaaacccttatg

SEQ ID NO: 3850 - RNA, 19 nt, synthetic construct
  source 1..19: mol_type = other RNA
tatgcctaaacccttatgc

SEQ ID NO: 3851 - RNA, 19 nt, synthetic construct
  source 1..19: mol_type = other RNA
atgcctaaacccttatgcc

SEQ ID NO: 3852 - RNA, 19 nt, synthetic construct
  source 1..19: mol_type = other RNA
tgcctaaacccttatgcca

SEQ ID NO: 3853 - RNA, 19 nt, synthetic construct
  source 1..19: mol_type = other RNA
gcctaaacccttatgccac

SEQ ID NO: 3854 - RNA, 19 nt, synthetic construct
  source 1..19: mol_type = other RNA
cctaaacccttatgccaca

SEQ ID NO: 3855 - RNA, 19 nt, synthetic construct
  source 1..19: mol_type = other RNA
ctaaacccttatgccacat

SEQ ID NO: 3856 - RNA, 19 nt, synthetic construct
  source 1..19: mol_type = other RNA
taaacccttatgccacata

SEQ ID NO: 3857 - RNA, 19 nt, synthetic construct
  source 1..19: mol_type = other RNA
aaacccttatgccacatag

SEQ ID NO: 3858 - RNA, 19 nt, synthetic construct
  source 1..19: mol_type = other RNA
aacccttatgccacatagt

SEQ ID NO: 3859 - RNA, 19 nt, synthetic construct
  source 1..19: mol_type = other RNA
acccttatgccacatagtg

SEQ ID NO: 3860 - RNA, 19 nt, synthetic construct
  source 1..19: mol_type = other RNA
cccttatgccacatagtgg

SEQ ID NO: 3861 - RNA, 19 nt, synthetic construct
  source 1..19: mol_type = other RNA
ccttatgccacatagtggt

SEQ ID NO: 3862 - RNA, 19 nt, synthetic construct
  source 1..19: mol_type = other RNA
cttatgccacatagtggta

SEQ ID NO: 3863 - RNA, 19 nt, synthetic construct
  source 1..19: mol_type = other RNA
ttatgccacatagtggtaa

SEQ ID NO: 3864 - RNA, 19 nt, synthetic construct
  source 1..19: mol_type = other RNA
tatgccacatagtggtaaa

SEQ ID NO: 3865 - RNA, 19 nt, synthetic construct
  source 1..19: mol_type = other RNA
atgccacatagtggtaaat

SEQ ID NO: 3866 - RNA, 19 nt, synthetic construct
  source 1..19: mol_type = other RNA
tgccacatagtggtaaata

SEQ ID NO: 3867 - RNA, 19 nt, synthetic construct
  source 1..19: mol_type = other RNA
gccacatagtggtaaataa

SEQ ID NO: 3868 - RNA, 19 nt, synthetic construct
  source 1..19: mol_type = other RNA
ccacatagtggtaaataat

SEQ ID NO: 3869 - RNA, 19 nt, synthetic construct
  source 1..19: mol_type = other RNA
cacatagtggtaaataatt

SEQ ID NO: 3870 - RNA, 19 nt, synthetic construct
  source 1..19: mol_type = other RNA
acatagtggtaaataatta

SEQ ID NO: 3871 - RNA, 19 nt, synthetic construct
  source 1..19: mol_type = other RNA
catagtggtaaataattat

SEQ ID NO: 3872 - RNA, 19 nt, synthetic construct
  source 1..19: mol_type = other RNA
atagtggtaaataattatg

SEQ ID NO: 3873 - RNA, 19 nt, synthetic construct
  source 1..19: mol_type = other RNA
tagtggtaaataattatga

SEQ ID NO: 3874 - RNA, 19 nt, synthetic construct
  source 1..19: mol_type = other RNA
agtggtaaataattatgaa

SEQ ID NO: 3875 - RNA, 19 nt, synthetic construct
  source 1..19: mol_type = other RNA
gtggtaaataattatgaaa

SEQ ID NO: 3876 - RNA, 19 nt, synthetic construct
  source 1..19: mol_type = other RNA
tggtaaataattatgaaaa

SEQ ID NO: 3877 - RNA, 19 nt, synthetic construct
  source 1..19: mol_type = other RNA
ggtaaataattatgaaaaa

SEQ ID NO: 3878 - RNA, 19 nt, synthetic construct
  source 1..19: mol_type = other RNA
gtaaataattatgaaaaat

SEQ ID NO: 3879 - RNA, 19 nt, synthetic construct
  source 1..19: mol_type = other RNA
taaataattatgaaaaatg

SEQ ID NO: 3880 - RNA, 19 nt, synthetic construct
  source 1..19: mol_type = other RNA
aaataattatgaaaaatgg

SEQ ID NO: 3881 - RNA, 19 nt, synthetic construct
  source 1..19: mol_type = other RNA
aataattatgaaaaatggt

SEQ ID NO: 3882 - RNA, 19 nt, synthetic construct
  source 1..19: mol_type = other RNA
ataattatgaaaaatggtc

SEQ ID NO: 3883 - RNA, 19 nt, synthetic construct
  source 1..19: mol_type = other RNA
taattatgaaaaatggtct

SEQ ID NO: 3884 - RNA, 19 nt, synthetic construct
  source 1..19: mol_type = other RNA
aattatgaaaaatggtctg

SEQ ID NO: 3885 - RNA, 19 nt, synthetic construct
  source 1..19: mol_type = other RNA
attatgaaaaatggtctgt

SEQ ID NO: 3886 - RNA, 19 nt, synthetic construct
  source 1..19: mol_type = other RNA
ttatgaaaaatggtctgtt

SEQ ID NO: 3887 - RNA, 19 nt, synthetic construct
  source 1..19: mol_type = other RNA
tatgaaaaatggtctgttc

SEQ ID NO: 3888 - RNA, 19 nt, synthetic construct
  source 1..19: mol_type = other RNA
atgaaaaatggtctgttca

SEQ ID NO: 3889 - RNA, 19 nt, synthetic construct
  source 1..19: mol_type = other RNA
tgaaaaatggtctgttcat

SEQ ID NO: 3890 - RNA, 19 nt, synthetic construct
  source 1..19: mol_type = other RNA
gaaaaatggtctgttcata

SEQ ID NO: 3891 - RNA, 19 nt, synthetic construct
  source 1..19: mol_type = other RNA
aaaaatggtctgttcataa

SEQ ID NO: 3892 - RNA, 19 nt, synthetic construct
  source 1..19: mol_type = other RNA
aaaatggtctgttcataat

SEQ ID NO: 3893 - RNA, 19 nt, synthetic construct
  source 1..19: mol_type = other RNA
aaatggtctgttcataatt

SEQ ID NO: 3894 - RNA, 19 nt, synthetic construct
  source 1..19: mol_type = other RNA
aatggtctgttcataattg

SEQ ID NO: 3895 - RNA, 19 nt, synthetic construct
  source 1..19: mol_type = other RNA
atggtctgttcataattgg

SEQ ID NO: 3896 - RNA, 19 nt, synthetic construct
  source 1..19: mol_type = other RNA
tggtctgttcataattggt

SEQ ID NO: 3897 - RNA, 19 nt, synthetic construct
  source 1..19: mol_type = other RNA
ggtctgttcataattggta

SEQ ID NO: 3898 - RNA, 19 nt, synthetic construct
  source 1..19: mol_type = other RNA
gtctgttcataattggtag

SEQ ID NO: 3899 - RNA, 19 nt, synthetic construct
  source 1..19: mol_type = other RNA
tctgttcataattggtagg

SEQ ID NO: 3900 - RNA, 19 nt, synthetic construct
  source 1..19: mol_type = other RNA
ctgttcataattggtaggt

SEQ ID NO: 3901 - RNA, 19 nt, synthetic construct
  source 1..19: mol_type = other RNA
tgttcataattggtaggtg

SEQ ID NO: 3902 - RNA, 19 nt, synthetic construct
  source 1..19: mol_type = other RNA
gttcataattggtaggtgc

SEQ ID NO: 3903 - RNA, 19 nt, synthetic construct
  source 1..19: mol_type = other RNA
ttcataattggtaggtgcc

SEQ ID NO: 3904 - RNA, 19 nt, synthetic construct
  source 1..19: mol_type = other RNA
tcataattggtaggtgcct

SEQ ID NO: 3905 - RNA, 19 nt, synthetic construct
  source 1..19: mol_type = other RNA
cataattggtaggtgcctt

SEQ ID NO: 3906 - RNA, 19 nt, synthetic construct
  source 1..19: mol_type = other RNA
ataattggtaggtgccttt

SEQ ID NO: 3907 - RNA, 19 nt, synthetic construct
  source 1..19: mol_type = other RNA
taattggtaggtgcctttt

SEQ ID NO: 3908 - RNA, 19 nt, synthetic construct
  source 1..19: mol_type = other RNA
aattggtaggtgccttttg

SEQ ID NO: 3909 - RNA, 19 nt, synthetic construct
  source 1..19: mol_type = other RNA
attggtaggtgccttttgt

SEQ ID NO: 3910 - RNA, 19 nt, synthetic construct
  source 1..19: mol_type = other RNA
ttggtaggtgccttttgtg

SEQ ID NO: 3911 - RNA, 19 nt, synthetic construct
  source 1..19: mol_type = other RNA
tggtaggtgccttttgtga

SEQ ID NO: 3912 - RNA, 19 nt, synthetic construct
  source 1..19: mol_type = other RNA
ggtaggtgccttttgtgag

SEQ ID NO: 3913 - RNA, 19 nt, synthetic construct
  source 1..19: mol_type = other RNA
gtaggtgccttttgtgagc

SEQ ID NO: 3914 - RNA, 19 nt, synthetic construct
  source 1..19: mol_type = other RNA
taggtgccttttgtgagca

SEQ ID NO: 3915 - RNA, 19 nt, synthetic construct
  source 1..19: mol_type = other RNA
aggtgccttttgtgagcag

SEQ ID NO: 3916 - RNA, 19 nt, synthetic construct
  source 1..19: mol_type = other RNA
ggtgccttttgtgagcagg

SEQ ID NO: 3917 - RNA, 19 nt, synthetic construct
  source 1..19: mol_type = other RNA
gtgccttttgtgagcaggg

SEQ ID NO: 3918 - RNA, 19 nt, synthetic construct
  source 1..19: mol_type = other RNA
tgccttttgtgagcaggga

SEQ ID NO: 3919 - RNA, 19 nt, synthetic construct
  source 1..19: mol_type = other RNA
gccttttgtgagcagggag

SEQ ID NO: 3920 - RNA, 19 nt, synthetic construct
  source 1..19: mol_type = other RNA
ccttttgtgagcagggagc

SEQ ID NO: 3921 - RNA, 19 nt, synthetic construct
  source 1..19: mol_type = other RNA
cttttgtgagcagggagca

SEQ ID NO: 3922 - RNA, 19 nt, synthetic construct
  source 1..19: mol_type = other RNA
ttttgtgagcagggagcat

SEQ ID NO: 3923 - RNA, 19 nt, synthetic construct
  source 1..19: mol_type = other RNA
tttgtgagcagggagcata

SEQ ID NO: 3924 - RNA, 19 nt, synthetic construct
  source 1..19: mol_type = other RNA
ttgtgagcagggagcataa

SEQ ID NO: 3925 - RNA, 19 nt, synthetic construct
  source 1..19: mol_type = other RNA
tgtgagcagggagcataat

SEQ ID NO: 3926 - RNA, 19 nt, synthetic construct
  source 1..19: mol_type = other RNA
gtgagcagggagcataatt

SEQ ID NO: 3927 - RNA, 19 nt, synthetic construct
  source 1..19: mol_type = other RNA
tgagcagggagcataatta

SEQ ID NO: 3928 - RNA, 19 nt, synthetic construct
  source 1..19: mol_type = other RNA
gagcagggagcataattat

SEQ ID NO: 3929 - RNA, 19 nt, synthetic construct
  source 1..19: mol_type = other RNA
agcagggagcataattatt

SEQ ID NO: 3930 - RNA, 19 nt, synthetic construct
  source 1..19: mol_type = other RNA
gcagggagcataattattg

SEQ ID NO: 3931 - RNA, 19 nt, synthetic construct
  source 1..19: mol_type = other RNA
cagggagcataattattgg

SEQ ID NO: 3932 - RNA, 19 nt, synthetic construct
  source 1..19: mol_type = other RNA
agggagcataattattggt

SEQ ID NO: 3933 - RNA, 19 nt, synthetic construct
  source 1..19: mol_type = other RNA
gggagcataattattggtt

SEQ ID NO: 3934 - RNA, 19 nt, synthetic construct
  source 1..19: mol_type = other RNA
ggagcataattattggttt

SEQ ID NO: 3935 - RNA, 19 nt, synthetic construct
  source 1..19: mol_type = other RNA
gagcataattattggttta

SEQ ID NO: 3936 - RNA, 19 nt, synthetic construct
  source 1..19: mol_type = other RNA
agcataattattggtttat

SEQ ID NO: 3937 - RNA, 19 nt, synthetic construct
  source 1..19: mol_type = other RNA
gcataattattggtttatt

SEQ ID NO: 3938 - RNA, 19 nt, synthetic construct
  source 1..19: mol_type = other RNA
cataattattggtttatta

SEQ ID NO: 3939 - RNA, 19 nt, synthetic construct
  source 1..19: mol_type = other RNA
ataattattggtttattat

SEQ ID NO: 3940 - RNA, 19 nt, synthetic construct
  source 1..19: mol_type = other RNA
taattattggtttattatg

SEQ ID NO: 3941 - RNA, 19 nt, synthetic construct
  source 1..19: mol_type = other RNA
aattattggtttattatgg

SEQ ID NO: 3942 - RNA, 19 nt, synthetic construct
  source 1..19: mol_type = other RNA
attattggtttattatggt

SEQ ID NO: 3943 - RNA, 19 nt, synthetic construct
  source 1..19: mol_type = other RNA
ttattggtttattatggta

SEQ ID NO: 3944 - RNA, 19 nt, synthetic construct
  source 1..19: mol_type = other RNA
tattggtttattatggtaa

SEQ ID NO: 3945 - RNA, 19 nt, synthetic construct
  source 1..19: mol_type = other RNA
attggtttattatggtaat

SEQ ID NO: 3946 - RNA, 19 nt, synthetic construct
  source 1..19: mol_type = other RNA
ttggtttattatggtaatt

SEQ ID NO: 3947 - RNA, 19 nt, synthetic construct
  source 1..19: mol_type = other RNA
tggtttattatggtaatta

SEQ ID NO: 3948 - RNA, 19 nt, synthetic construct
  source 1..19: mol_type = other RNA
ggtttattatggtaattat

SEQ ID NO: 3949 - RNA, 19 nt, synthetic construct
  source 1..19: mol_type = other RNA
gtttattatggtaattatg

SEQ ID NO: 3950 - RNA, 19 nt, synthetic construct
  source 1..19: mol_type = other RNA
tttattatggtaattatgg

SEQ ID NO: 3951 - RNA, 19 nt, synthetic construct
  source 1..19: mol_type = other RNA
ttattatggtaattatggt

SEQ ID NO: 3952 - RNA, 19 nt, synthetic construct
  source 1..19: mol_type = other RNA
tattatggtaattatggtg

SEQ ID NO: 3953 - RNA, 19 nt, synthetic construct
  source 1..19: mol_type = other RNA
attatggtaattatggtga

SEQ ID NO: 3954 - RNA, 19 nt, synthetic construct
  source 1..19: mol_type = other RNA
ttatggtaattatggtgat

SEQ ID NO: 3955 - RNA, 19 nt, synthetic construct
  source 1..19: mol_type = other RNA
tatggtaattatggtgatt

SEQ ID NO: 3956 - RNA, 19 nt, synthetic construct
  source 1..19: mol_type = other RNA
atggtaattatggtgattt

SEQ ID NO: 3957 - RNA, 19 nt, synthetic construct
  source 1..19: mol_type = other RNA
tggtaattatggtgatttt

SEQ ID NO: 3958 - RNA, 19 nt, synthetic construct
  source 1..19: mol_type = other RNA
ggtaattatggtgattttt

SEQ ID NO: 3959 - RNA, 19 nt, synthetic construct
  source 1..19: mol_type = other RNA
gtaattatggtgatttttt

SEQ ID NO: 3960 - RNA, 19 nt, synthetic construct
  source 1..19: mol_type = other RNA
taattatggtgatttttta

SEQ ID NO: 3961 - RNA, 19 nt, synthetic construct
  source 1..19: mol_type = other RNA
aattatggtgattttttaa

SEQ ID NO: 3962 - RNA, 19 nt, synthetic construct
  source 1..19: mol_type = other RNA
attatggtgattttttaaa

SEQ ID NO: 3963 - RNA, 19 nt, synthetic construct
  source 1..19: mol_type = other RNA
ttatggtgattttttaaat

SEQ ID NO: 3964 - RNA, 19 nt, synthetic construct
  source 1..19: mol_type = other RNA
tatggtgattttttaaata

SEQ ID NO: 3965 - RNA, 19 nt, synthetic construct
  source 1..19: mol_type = other RNA
atggtgattttttaaatat

SEQ ID NO: 3966 - RNA, 19 nt, synthetic construct
  source 1..19: mol_type = other RNA
tggtgattttttaaatatc

SEQ ID NO: 3967 - RNA, 19 nt, synthetic construct
  source 1..19: mol_type = other RNA
ggtgattttttaaatatca

SEQ ID NO: 3968 - RNA, 19 nt, synthetic construct
  source 1..19: mol_type = other RNA
gtgattttttaaatatcat

SEQ ID NO: 3969 - RNA, 19 nt, synthetic construct
  source 1..19: mol_type = other RNA
tgattttttaaatatcatg

SEQ ID NO: 3970 - RNA, 19 nt, synthetic construct
  source 1..19: mol_type = other RNA
gattttttaaatatcatgt

SEQ ID NO: 3971 - RNA, 19 nt, synthetic construct
  source 1..19: mol_type = other RNA
attttttaaatatcatgta

SEQ ID NO: 3972 - RNA, 19 nt, synthetic construct
  source 1..19: mol_type = other RNA
ttttttaaatatcatgtaa

SEQ ID NO: 3973 - RNA, 19 nt, synthetic construct
  source 1..19: mol_type = other RNA
tttttaaatatcatgtaat

SEQ ID NO: 3974 - RNA, 19 nt, synthetic construct
  source 1..19: mol_type = other RNA
ttttaaatatcatgtaatg

SEQ ID NO: 3975 - RNA, 19 nt, synthetic construct
  source 1..19: mol_type = other RNA
tttaaatatcatgtaatgt

SEQ ID NO: 3976 - RNA, 19 nt, synthetic construct
  source 1..19: mol_type = other RNA
ttaaatatcatgtaatgtt

SEQ ID NO: 3977 - RNA, 19 nt, synthetic construct
  source 1..19: mol_type = other RNA
taaatatcatgtaatgtta

SEQ ID NO: 3978 - RNA, 19 nt, synthetic construct
  source 1..19: mol_type = other RNA
aaatatcatgtaatgttaa

SEQ ID NO: 3979 - RNA, 19 nt, synthetic construct
  source 1..19: mol_type = other RNA
aatatcatgtaatgttaaa

SEQ ID NO: 3980 - RNA, 19 nt, synthetic construct
  source 1..19: mol_type = other RNA
atatcatgtaatgttaaaa

SEQ ID NO: 3981 - RNA, 19 nt, synthetic construct
  source 1..19: mol_type = other RNA
tatcatgtaatgttaaaac

SEQ ID NO: 3982 - RNA, 19 nt, synthetic construct
  source 1..19: mol_type = other RNA
atcatgtaatgttaaaacg

SEQ ID NO: 3983 - RNA, 19 nt, synthetic construct
  source 1..19: mol_type = other RNA
tcatgtaatgttaaaacgt

SEQ ID NO: 3984 - RNA, 19 nt, synthetic construct
  source 1..19: mol_type = other RNA
catgtaatgttaaaacgtt

SEQ ID NO: 3985 - RNA, 19 nt, synthetic construct
  source 1..19: mol_type = other RNA
atgtaatgttaaaacgttt

SEQ ID NO: 3986 - RNA, 19 nt, synthetic construct
  source 1..19: mol_type = other RNA
tgtaatgttaaaacgtttt

SEQ ID NO: 3987 - RNA, 19 nt, synthetic construct
  source 1..19: mol_type = other RNA
gtaatgttaaaacgttttc

SEQ ID NO: 3988 - RNA, 19 nt, synthetic construct
  source 1..19: mol_type = other RNA
taatgttaaaacgttttct

SEQ ID NO: 3989 - RNA, 19 nt, synthetic construct
  source 1..19: mol_type = other RNA
aatgttaaaacgttttcta

SEQ ID NO: 3990 - RNA, 19 nt, synthetic construct
  source 1..19: mol_type = other RNA
atgttaaaacgttttctaa

SEQ ID NO: 3991 - RNA, 19 nt, synthetic construct
  source 1..19: mol_type = other RNA
tgttaaaacgttttctaac

SEQ ID NO: 3992 - RNA, 19 nt, synthetic construct
  source 1..19: mol_type = other RNA
gttaaaacgttttctaaca

SEQ ID NO: 3993 - RNA, 19 nt, synthetic construct
  source 1..19: mol_type = other RNA
ttaaaacgttttctaacag

SEQ ID NO: 3994 - RNA, 19 nt, synthetic construct
  source 1..19: mol_type = other RNA
taaaacgttttctaacagt

SEQ ID NO: 3995 - RNA, 19 nt, synthetic construct
  source 1..19: mol_type = other RNA
aaaacgttttctaacagtt

SEQ ID NO: 3996 - RNA, 19 nt, synthetic construct
  source 1..19: mol_type = other RNA
aaacgttttctaacagttt

SEQ ID NO: 3997 - RNA, 19 nt, synthetic construct
  source 1..19: mol_type = other RNA
aacgttttctaacagttta

SEQ ID NO: 3998 - RNA, 19 nt, synthetic construct
  source 1..19: mol_type = other RNA
acgttttctaacagtttac

SEQ ID NO: 3999 - RNA, 19 nt, synthetic construct
  source 1..19: mol_type = other RNA
cgttttctaacagtttact

SEQ ID NO: 4000 - RNA, 19 nt, synthetic construct
  source 1..19: mol_type = other RNA
gttttctaacagtttactg

SEQ ID NO: 4001 - RNA, 19 nt, synthetic construct
  source 1..19: mol_type = other RNA
ttttctaacagtttactgt

SEQ ID NO: 4002 - RNA, 19 nt, synthetic construct
  source 1..19: mol_type = other RNA
tttctaacagtttactgtt

SEQ ID NO: 4003 - RNA, 19 nt, synthetic construct
  source 1..19: mol_type = other RNA
ttctaacagtttactgttg

SEQ ID NO: 4004 - RNA, 19 nt, synthetic construct
  source 1..19: mol_type = other RNA
tctaacagtttactgttgc

SEQ ID NO: 4005 - RNA, 19 nt, synthetic construct
  source 1..19: mol_type = other RNA
ctaacagtttactgttgct

SEQ ID NO: 4006 - RNA, 19 nt, synthetic construct
  source 1..19: mol_type = other RNA
taacagtttactgttgctt

SEQ ID NO: 4007 - RNA, 19 nt, synthetic construct
  source 1..19: mol_type = other RNA
aacagtttactgttgctta

SEQ ID NO: 4008 - RNA, 19 nt, synthetic construct
  source 1..19: mol_type = other RNA
acagtttactgttgcttat

SEQ ID NO: 4009 - RNA, 19 nt, synthetic construct
  source 1..19: mol_type = other RNA
cagtttactgttgcttatc

SEQ ID NO: 4010 - RNA, 19 nt, synthetic construct
  source 1..19: mol_type = other RNA
agtttactgttgcttatct

SEQ ID NO: 4011 - RNA, 19 nt, synthetic construct
  source 1..19: mol_type = other RNA
gtttactgttgcttatctc

SEQ ID NO: 4012 - RNA, 19 nt, synthetic construct
  source 1..19: mol_type = other RNA
tttactgttgcttatctcc

SEQ ID NO: 4013 - RNA, 19 nt, synthetic construct
  source 1..19: mol_type = other RNA
ttactgttgcttatctcca

SEQ ID NO: 4014 - RNA, 19 nt, synthetic construct
  source 1..19: mol_type = other RNA
tactgttgcttatctccaa

SEQ ID NO: 4015 - RNA, 19 nt, synthetic construct
  source 1..19: mol_type = other RNA
actgttgcttatctccaag

SEQ ID NO: 4016 - RNA, 19 nt, synthetic construct
  source 1..19: mol_type = other RNA
ctgttgcttatctccaaga

SEQ ID NO: 4017 - RNA, 19 nt, synthetic construct
  source 1..19: mol_type = other RNA
tgttgcttatctccaagat

SEQ ID NO: 4018 - RNA, 19 nt, synthetic construct
  source 1..19: mol_type = other RNA
gttgcttatctccaagata

SEQ ID NO: 4019 - RNA, 19 nt, synthetic construct
  source 1..19: mol_type = other RNA
ttgcttatctccaagatat

SEQ ID NO: 4020 - RNA, 19 nt, synthetic construct
  source 1..19: mol_type = other RNA
tgcttatctccaagatatt

SEQ ID NO: 4021 - RNA, 19 nt, synthetic construct
  source 1..19: mol_type = other RNA
gcttatctccaagatatta

SEQ ID NO: 4022 - RNA, 19 nt, synthetic construct
  source 1..19: mol_type = other RNA
cttatctccaagatattat

SEQ ID NO: 4023 - RNA, 19 nt, synthetic construct
  source 1..19: mol_type = other RNA
ttatctccaagatattatg

SEQ ID NO: 4024 - RNA, 19 nt, synthetic construct
  source 1..19: mol_type = other RNA
tatctccaagatattatgg

SEQ ID NO: 4025 - RNA, 19 nt, synthetic construct
  source 1..19: mol_type = other RNA
atctccaagatattatgga

SEQ ID NO: 4026 - RNA, 19 nt, synthetic construct
  source 1..19: mol_type = other RNA
tctccaagatattatggaa

SEQ ID NO: 4027 - RNA, 19 nt, synthetic construct
  source 1..19: mol_type = other RNA
ctccaagatattatggaat

SEQ ID NO: 4028 - RNA, 19 nt, synthetic construct
  source 1..19: mol_type = other RNA
tccaagatattatggaatt

SEQ ID NO: 4029 - RNA, 19 nt, synthetic construct
  source 1..19: mol_type = other RNA
ccaagatattatggaatta

SEQ ID NO: 4030 - RNA, 19 nt, synthetic construct
  source 1..19: mol_type = other RNA
caagatattatggaattaa

SEQ ID NO: 4031 - RNA, 19 nt, synthetic construct
  source 1..19: mol_type = other RNA
aagatattatggaattaag

SEQ ID NO: 4032 - RNA, 19 nt, synthetic construct
  source 1..19: mol_type = other RNA
agatattatggaattaaga

SEQ ID NO: 4033 - RNA, 19 nt, synthetic construct
  source 1..19: mol_type = other RNA
gatattatggaattaagaa

SEQ ID NO: 4034 - RNA, 19 nt, synthetic construct
  source 1..19: mol_type = other RNA
atattatggaattaagaat

SEQ ID NO: 4035 - RNA, 19 nt, synthetic construct
  source 1..19: mol_type = other RNA
tattatggaattaagaatt

SEQ ID NO: 4036 - RNA, 19 nt, synthetic construct
  source 1..19: mol_type = other RNA
attatggaattaagaattt

SEQ ID NO: 4037 - RNA, 19 nt, synthetic construct
  source 1..19: mol_type = other RNA
ttatggaattaagaatttt

SEQ ID NO: 4038 - RNA, 19 nt, synthetic construct
  source 1..19: mol_type = other RNA
tatggaattaagaattttt

SEQ ID NO: 4039 - RNA, 19 nt, synthetic construct
  source 1..19: mol_type = other RNA
atggaattaagaatttttc

SEQ ID NO: 4040 - RNA, 19 nt, synthetic construct
  source 1..19: mol_type = other RNA
tggaattaagaatttttcc

SEQ ID NO: 4041 - RNA, 19 nt, synthetic construct
  source 1..19: mol_type = other RNA
ggaattaagaatttttcca

SEQ ID NO: 4042 - RNA, 19 nt, synthetic construct
  source 1..19: mol_type = other RNA
gaattaagaatttttccag

SEQ ID NO: 4043 - RNA, 19 nt, synthetic construct
  source 1..19: mol_type = other RNA
aattaagaatttttccaga

SEQ ID NO: 4044 - RNA, 19 nt, synthetic construct
  source 1..19: mol_type = other RNA
attaagaatttttccagat

SEQ ID NO: 4045 - RNA, 19 nt, synthetic construct
  source 1..19: mol_type = other RNA
ttaagaatttttccagatg

SEQ ID NO: 4046 - RNA, 19 nt, synthetic construct
  source 1..19: mol_type = other RNA
taagaatttttccagatga

SEQ ID NO: 4047 - RNA, 19 nt, synthetic construct
  source 1..19: mol_type = other RNA
aagaatttttccagatgag

SEQ ID NO: 4048 - RNA, 19 nt, synthetic construct
  source 1..19: mol_type = other RNA
agaatttttccagatgagt

SEQ ID NO: 4049 - RNA, 19 nt, synthetic construct
  source 1..19: mol_type = other RNA
gaatttttccagatgagtg

SEQ ID NO: 4050 - RNA, 19 nt, synthetic construct
  source 1..19: mol_type = other RNA
aatttttccagatgagtgt

SEQ ID NO: 4051 - RNA, 19 nt, synthetic construct
  source 1..19: mol_type = other RNA
atttttccagatgagtgtt

SEQ ID NO: 4052 - RNA, 19 nt, synthetic construct
  source 1..19: mol_type = other RNA
tttttccagatgagtgtta

SEQ ID NO: 4053 - RNA, 19 nt, synthetic construct
  source 1..19: mol_type = other RNA
ttttccagatgagtgttac

SEQ ID NO: 4054 - RNA, 19 nt, synthetic construct
  source 1..19: mol_type = other RNA
tttccagatgagtgttaca

SEQ ID NO: 4055 - RNA, 19 nt, synthetic construct
  source 1..19: mol_type = other RNA
ttccagatgagtgttacat

SEQ ID NO: 4056 - RNA, 19 nt, synthetic construct
  source 1..19: mol_type = other RNA
tccagatgagtgttacata

SEQ ID NO: 4057 - RNA, 19 nt, synthetic construct
  source 1..19: mol_type = other RNA
ccagatgagtgttacatag

SEQ ID NO: 4058 - RNA, 19 nt, synthetic construct
  source 1..19: mol_type = other RNA
cagatgagtgttacataga

SEQ ID NO: 4059 - RNA, 19 nt, synthetic construct
  source 1..19: mol_type = other RNA
agatgagtgttacatagat

SEQ ID NO: 4060 - RNA, 19 nt, synthetic construct
  source 1..19: mol_type = other RNA
gatgagtgttacatagatt

SEQ ID NO: 4061 - RNA, 19 nt, synthetic construct
  source 1..19: mol_type = other RNA
atgagtgttacatagattc

SEQ ID NO: 4062 - RNA, 19 nt, synthetic construct
  source 1..19: mol_type = other RNA
tgagtgttacatagattct

SEQ ID NO: 4063 - RNA, 19 nt, synthetic construct
  source 1..19: mol_type = other RNA
gagtgttacatagattctt

SEQ ID NO: 4064 - RNA, 19 nt, synthetic construct
  source 1..19: mol_type = other RNA
agtgttacatagattcttt

SEQ ID NO: 4065 - RNA, 19 nt, synthetic construct
  source 1..19: mol_type = other RNA
gtgttacatagattctttg

SEQ ID NO: 4066 - RNA, 19 nt, synthetic construct
  source 1..19: mol_type = other RNA
tgttacatagattctttga

SEQ ID NO: 4067 - RNA, 19 nt, synthetic construct
  source 1..19: mol_type = other RNA
gttacatagattctttgaa

SEQ ID NO: 4068 - RNA, 19 nt, synthetic construct
  source 1..19: mol_type = other RNA
ttacatagattctttgaat

SEQ ID NO: 4069 - RNA, 19 nt, synthetic construct
  source 1..19: mol_type = other RNA
tacatagattctttgaatt

SEQ ID NO: 4070 - RNA, 19 nt, synthetic construct
  source 1..19: mol_type = other RNA
acatagattctttgaattt

SEQ ID NO: 4071 - RNA, 19 nt, synthetic construct
  source 1..19: mol_type = other RNA
catagattctttgaattta

SEQ ID NO: 4072 - RNA, 19 nt, synthetic construct
  source 1..19: mol_type = other RNA
atagattctttgaatttag

SEQ ID NO: 4073 - RNA, 19 nt, synthetic construct
  source 1..19: mol_type = other RNA
tagattctttgaatttagt

SEQ ID NO: 4074 - RNA, 19 nt, synthetic construct
  source 1..19: mol_type = other RNA
agattctttgaatttagta

SEQ ID NO: 4075 - RNA, 19 nt, synthetic construct
  source 1..19: mol_type = other RNA
gattctttgaatttagtat

SEQ ID NO: 4076 - RNA, 19 nt, synthetic construct
  source 1..19: mol_type = other RNA
attctttgaatttagtata

SEQ ID NO: 4077 - RNA, 19 nt, synthetic construct
  source 1..19: mol_type = other RNA
ttctttgaatttagtataa

SEQ ID NO: 4078 - RNA, 19 nt, synthetic construct
  source 1..19: mol_type = other RNA
tctttgaatttagtataaa

SEQ ID NO: 4079 - RNA, 19 nt, synthetic construct
  source 1..19: mol_type = other RNA
ctttgaatttagtataaaa

SEQ ID NO: 4080 - RNA, 19 nt, synthetic construct
  source 1..19: mol_type = other RNA
tttgaatttagtataaaag

SEQ ID NO: 4081 - RNA, 19 nt, synthetic construct
  source 1..19: mol_type = other RNA
ttgaatttagtataaaagt

SEQ ID NO: 4082 - RNA, 19 nt, synthetic construct
  source 1..19: mol_type = other RNA
tgaatttagtataaaagta

SEQ ID NO: 4083 - RNA, 19 nt, synthetic construct
  source 1..19: mol_type = other RNA
gaatttagtataaaagtac

SEQ ID NO: 4084 - RNA, 19 nt, synthetic construct
  source 1..19: mol_type = other RNA
aatttagtataaaagtact

SEQ ID NO: 4085 - RNA, 19 nt, synthetic construct
  source 1..19: mol_type = other RNA
atttagtataaaagtactg

SEQ ID NO: 4086 - RNA, 19 nt, synthetic construct
  source 1..19: mol_type = other RNA
tttagtataaaagtactga

SEQ ID NO: 4087 - RNA, 19 nt, synthetic construct
  source 1..19: mol_type = other RNA
ttagtataaaagtactgag

SEQ ID NO: 4088 - RNA, 19 nt, synthetic construct
  source 1..19: mol_type = other RNA
tagtataaaagtactgaga

SEQ ID NO: 4089 - RNA, 19 nt, synthetic construct
  source 1..19: mol_type = other RNA
agtataaaagtactgagaa

SEQ ID NO: 4090 - RNA, 19 nt, synthetic construct
  source 1..19: mol_type = other RNA
gtataaaagtactgagaat

SEQ ID NO: 4091 - RNA, 19 nt, synthetic construct
  source 1..19: mol_type = other RNA
tataaaagtactgagaatt

SEQ ID NO: 4092 - RNA, 19 nt, synthetic construct
  source 1..19: mol_type = other RNA
ataaaagtactgagaatta

SEQ ID NO: 4093 - RNA, 19 nt, synthetic construct
  source 1..19: mol_type = other RNA
taaaagtactgagaattaa

SEQ ID NO: 4094 - RNA, 19 nt, synthetic construct
  source 1..19: mol_type = other RNA
aaaagtactgagaattaag

SEQ ID NO: 4095 - RNA, 19 nt, synthetic construct
  source 1..19: mol_type = other RNA
aaagtactgagaattaagt

SEQ ID NO: 4096 - RNA, 19 nt, synthetic construct
  source 1..19: mol_type = other RNA
aagtactgagaattaagtt

SEQ ID NO: 4097 - RNA, 19 nt, synthetic construct
  source 1..19: mol_type = other RNA
agtactgagaattaagttt

SEQ ID NO: 4098 - RNA, 19 nt, synthetic construct
  source 1..19: mol_type = other RNA
gtactgagaattaagtttg

SEQ ID NO: 4099 - RNA, 19 nt, synthetic construct
  source 1..19: mol_type = other RNA
tactgagaattaagtttgt

SEQ ID NO: 4100 - RNA, 19 nt, synthetic construct
  source 1..19: mol_type = other RNA
actgagaattaagtttgta

SEQ ID NO: 4101 - RNA, 19 nt, synthetic construct
  source 1..19: mol_type = other RNA
ctgagaattaagtttgtac

SEQ ID NO: 4102 - RNA, 19 nt, synthetic construct
  source 1..19: mol_type = other RNA
tgagaattaagtttgtact

SEQ ID NO: 4103 - RNA, 19 nt, synthetic construct
  source 1..19: mol_type = other RNA
gagaattaagtttgtactt

SEQ ID NO: 4104 - RNA, 19 nt, synthetic construct
  source 1..19: mol_type = other RNA
agaattaagtttgtacttc

SEQ ID NO: 4105 - RNA, 19 nt, synthetic construct
  source 1..19: mol_type = other RNA
gaattaagtttgtacttcc

SEQ ID NO: 4106 - RNA, 19 nt, synthetic construct
  source 1..19: mol_type = other RNA
aattaagtttgtacttcca

SEQ ID NO: 4107 - RNA, 19 nt, synthetic construct
  source 1..19: mol_type = other RNA
attaagtttgtacttccat

SEQ ID NO: 4108 - RNA, 19 nt, synthetic construct
  source 1..19: mol_type = other RNA
ttaagtttgtacttccata

SEQ ID NO: 4109 - RNA, 19 nt, synthetic construct
  source 1..19: mol_type = other RNA
taagtttgtacttccataa

SEQ ID NO: 4110 - RNA, 19 nt, synthetic construct
  source 1..19: mol_type = other RNA
aagtttgtacttccataag

SEQ ID NO: 4111 - RNA, 19 nt, synthetic construct
  source 1..19: mol_type = other RNA
agtttgtacttccataagc

SEQ ID NO: 4112 - RNA, 19 nt, synthetic construct
  source 1..19: mol_type = other RNA
gtttgtacttccataagct

SEQ ID NO: 4113 - RNA, 19 nt, synthetic construct
  source 1..19: mol_type = other RNA
tttgtacttccataagctt

SEQ ID NO: 4114 - RNA, 19 nt, synthetic construct
  source 1..19: mol_type = other RNA
ttgtacttccataagcttg

SEQ ID NO: 4115 - RNA, 19 nt, synthetic construct
  source 1..19: mol_type = other RNA
tgtacttccataagcttgg

SEQ ID NO: 4116 - RNA, 19 nt, synthetic construct
  source 1..19: mol_type = other RNA
gtacttccataagcttgga

SEQ ID NO: 4117 - RNA, 19 nt, synthetic construct
  source 1..19: mol_type = other RNA
tacttccataagcttggat

SEQ ID NO: 4118 - RNA, 19 nt, synthetic construct
  source 1..19: mol_type = other RNA
acttccataagcttggatt

SEQ ID NO: 4119 - RNA, 19 nt, synthetic construct
  source 1..19: mol_type = other RNA
cttccataagcttggattt

SEQ ID NO: 4120 - RNA, 19 nt, synthetic construct
  source 1..19: mol_type = other RNA
ttccataagcttggatttt

SEQ ID NO: 4121 - RNA, 19 nt, synthetic construct
  source 1..19: mol_type = other RNA
tccataagcttggatttta

SEQ ID NO: 4122 - RNA, 19 nt, synthetic construct
  source 1..19: mol_type = other RNA
ccataagcttggattttaa

SEQ ID NO: 4123 - RNA, 19 nt, synthetic construct
  source 1..19: mol_type = other RNA
cataagcttggattttaaa

SEQ ID NO: 4124 - RNA, 19 nt, synthetic construct
  source 1..19: mol_type = other RNA
ataagcttggattttaaac

SEQ ID NO: 4125 - RNA, 19 nt, synthetic construct
  source 1..19: mol_type = other RNA
taagcttggattttaaaca

SEQ ID NO: 4126 - RNA, 19 nt, synthetic construct
  source 1..19: mol_type = other RNA
aagcttggattttaaacac

SEQ ID NO: 4127 - RNA, 19 nt, synthetic construct
  source 1..19: mol_type = other RNA
agcttggattttaaacact

SEQ ID NO: 4128 - RNA, 19 nt, synthetic construct
  source 1..19: mol_type = other RNA
gcttggattttaaacactg

SEQ ID NO: 4129 - RNA, 19 nt, synthetic construct
  source 1..19: mol_type = other RNA
cttggattttaaacactga

SEQ ID NO: 4130 - RNA, 19 nt, synthetic construct
  source 1..19: mol_type = other RNA
ttggattttaaacactgat

SEQ ID NO: 4131 - RNA, 19 nt, synthetic construct
  source 1..19: mol_type = other RNA
tggattttaaacactgata

SEQ ID NO: 4132 - RNA, 19 nt, synthetic construct
  source 1..19: mol_type = other RNA
ggattttaaacactgatag

SEQ ID NO: 4133 - RNA, 19 nt, synthetic construct
  source 1..19: mol_type = other RNA
gattttaaacactgatagt

SEQ ID NO: 4134 - RNA, 19 nt, synthetic construct
  source 1..19: mol_type = other RNA
attttaaacactgatagta

SEQ ID NO: 4135 - RNA, 19 nt, synthetic construct
  source 1..19: mol_type = other RNA
ttttaaacactgatagtat

SEQ ID NO: 4136 - RNA, 19 nt, synthetic construct
  source 1..19: mol_type = other RNA
tttaaacactgatagtatc

SEQ ID NO: 4137 - RNA, 19 nt, synthetic construct
  source 1..19: mol_type = other RNA
ttaaacactgatagtatct

SEQ ID NO: 4138 - RNA, 19 nt, synthetic construct
  source 1..19: mol_type = other RNA
taaacactgatagtatctc

SEQ ID NO: 4139 - RNA, 19 nt, synthetic construct
  source 1..19: mol_type = other RNA
aaacactgatagtatctca

SEQ ID NO: 4140 - RNA, 19 nt, synthetic construct
  source 1..19: mol_type = other RNA
aacactgatagtatctcat

SEQ ID NO: 4141 - RNA, 19 nt, synthetic construct
  source 1..19: mol_type = other RNA
acactgatagtatctcatg

SEQ ID NO: 4142 - RNA, 19 nt, synthetic construct
  source 1..19: mol_type = other RNA
cactgatagtatctcatga

SEQ ID NO: 4143 - RNA, 19 nt, synthetic construct
  source 1..19: mol_type = other RNA
actgatagtatctcatgag

SEQ ID NO: 4144 - RNA, 19 nt, synthetic construct
  source 1..19: mol_type = other RNA
ctgatagtatctcatgagt

SEQ ID NO: 4145 - RNA, 19 nt, synthetic construct
  source 1..19: mol_type = other RNA
tgatagtatctcatgagta

SEQ ID NO: 4146 - RNA, 19 nt, synthetic construct
  source 1..19: mol_type = other RNA
gatagtatctcatgagtaa

SEQ ID NO: 4147 - RNA, 19 nt, synthetic construct
  source 1..19: mol_type = other RNA
atagtatctcatgagtaat

SEQ ID NO: 4148 - RNA, 19 nt, synthetic construct
  source 1..19: mol_type = other RNA
tagtatctcatgagtaatg

SEQ ID NO: 4149 - RNA, 19 nt, synthetic construct
  source 1..19: mol_type = other RNA
agtatctcatgagtaatgt

SEQ ID NO: 4150 - RNA, 19 nt, synthetic construct
  source 1..19: mol_type = other RNA
gtatctcatgagtaatgtg

SEQ ID NO: 4151 - RNA, 19 nt, synthetic construct
  source 1..19: mol_type = other RNA
tatctcatgagtaatgtgt

SEQ ID NO: 4152 - RNA, 19 nt, synthetic construct
  source 1..19: mol_type = other RNA
atctcatgagtaatgtgtg

SEQ ID NO: 4153 - RNA, 19 nt, synthetic construct
  source 1..19: mol_type = other RNA
tctcatgagtaatgtgtgt

SEQ ID NO: 4154 - RNA, 19 nt, synthetic construct
  source 1..19: mol_type = other RNA
ctcatgagtaatgtgtgtt

SEQ ID NO: 4155 - RNA, 19 nt, synthetic construct
  source 1..19: mol_type = other RNA
tcatgagtaatgtgtgttt

SEQ ID NO: 4156 - RNA, 19 nt, synthetic construct
  source 1..19: mol_type = other RNA
catgagtaatgtgtgtttt

SEQ ID NO: 4157 - RNA, 19 nt, synthetic construct
  source 1..19: mol_type = other RNA
atgagtaatgtgtgttttg

SEQ ID NO: 4158 - RNA, 19 nt, synthetic construct
  source 1..19: mol_type = other RNA
tgagtaatgtgtgttttgg

SEQ ID NO: 4159 - RNA, 19 nt, synthetic construct
  source 1..19: mol_type = other RNA
gagtaatgtgtgttttggg

SEQ ID NO: 4160 - RNA, 19 nt, synthetic construct
  source 1..19: mol_type = other RNA
agtaatgtgtgttttggga

SEQ ID NO: 4161 - RNA, 19 nt, synthetic construct
  source 1..19: mol_type = other RNA
gtaatgtgtgttttgggag

SEQ ID NO: 4162 - RNA, 19 nt, synthetic construct
  source 1..19: mol_type = other RNA
taatgtgtgttttgggaga

SEQ ID NO: 4163 - RNA, 19 nt, synthetic construct
  source 1..19: mol_type = other RNA
aatgtgtgttttgggagag

SEQ ID NO: 4164 - RNA, 19 nt, synthetic construct
  source 1..19: mol_type = other RNA
atgtgtgttttgggagagg

SEQ ID NO: 4165 - RNA, 19 nt, synthetic construct
  source 1..19: mol_type = other RNA
tgtgtgttttgggagaggg

SEQ ID NO: 4166 - RNA, 19 nt, synthetic construct
  source 1..19: mol_type = other RNA
gtgtgttttgggagaggga

SEQ ID NO: 4167 - RNA, 19 nt, synthetic construct
  source 1..19: mol_type = other RNA
tgtgttttgggagagggag

SEQ ID NO: 4168 - RNA, 19 nt, synthetic construct
  source 1..19: mol_type = other RNA
gtgttttgggagagggagg

SEQ ID NO: 4169 - RNA, 19 nt, synthetic construct
  source 1..19: mol_type = other RNA
tgttttgggagagggaggg

SEQ ID NO: 4170 - RNA, 19 nt, synthetic construct
  source 1..19: mol_type = other RNA
gttttgggagagggaggga

SEQ ID NO: 4171 - RNA, 19 nt, synthetic construct
  source 1..19: mol_type = other RNA
ttttgggagagggagggat

SEQ ID NO: 4172 - RNA, 19 nt, synthetic construct
  source 1..19: mol_type = other RNA
tttgggagagggagggatg

SEQ ID NO: 4173 - RNA, 19 nt, synthetic construct
  source 1..19: mol_type = other RNA
ttgggagagggagggatgc

SEQ ID NO: 4174 - RNA, 19 nt, synthetic construct
  source 1..19: mol_type = other RNA
tgggagagggagggatgct

SEQ ID NO: 4175 - RNA, 19 nt, synthetic construct
  source 1..19: mol_type = other RNA
gggagagggagggatgctg

SEQ ID NO: 4176 - RNA, 19 nt, synthetic construct
  source 1..19: mol_type = other RNA
ggagagggagggatgctga

SEQ ID NO: 4177 - RNA, 19 nt, synthetic construct
  source 1..19: mol_type = other RNA
gagagggagggatgctgat

SEQ ID NO: 4178 - RNA, 19 nt, synthetic construct
  source 1..19: mol_type = other RNA
agagggagggatgctgatt

SEQ ID NO: 4179 - RNA, 19 nt, synthetic construct
  source 1..19: mol_type = other RNA
gagggagggatgctgattg

SEQ ID NO: 4180 - RNA, 19 nt, synthetic construct
  source 1..19: mol_type = other RNA
agggagggatgctgattga

SEQ ID NO: 4181 - RNA, 19 nt, synthetic construct
  source 1..19: mol_type = other RNA
gggagggatgctgattgat

SEQ ID NO: 4182 - RNA, 19 nt, synthetic construct
  source 1..19: mol_type = other RNA
ggagggatgctgattgata

SEQ ID NO: 4183 - RNA, 19 nt, synthetic construct
  source 1..19: mol_type = other RNA
gagggatgctgattgatat

SEQ ID NO: 4184 - RNA, 19 nt, synthetic construct
  source 1..19: mol_type = other RNA
agggatgctgattgatatt

SEQ ID NO: 4185 - RNA, 19 nt, synthetic construct
  source 1..19: mol_type = other RNA
gggatgctgattgatattt

SEQ ID NO: 4186 - RNA, 19 nt, synthetic construct
  source 1..19: mol_type = other RNA
ggatgctgattgatatttc

SEQ ID NO: 4187 - RNA, 19 nt, synthetic construct
  source 1..19: mol_type = other RNA
gatgctgattgatatttca

SEQ ID NO: 4188 - RNA, 19 nt, synthetic construct
  source 1..19: mol_type = other RNA
atgctgattgatatttcac

SEQ ID NO: 4189 - RNA, 19 nt, synthetic construct
  source 1..19: mol_type = other RNA
tgctgattgatatttcaca

SEQ ID NO: 4190 - RNA, 19 nt, synthetic construct
  source 1..19: mol_type = other RNA
gctgattgatatttcacat

SEQ ID NO: 4191 - RNA, 19 nt, synthetic construct
  source 1..19: mol_type = other RNA
ctgattgatatttcacatt

SEQ ID NO: 4192 - RNA, 19 nt, synthetic construct
  source 1..19: mol_type = other RNA
tgattgatatttcacattg

SEQ ID NO: 4193 - RNA, 19 nt, synthetic construct
  source 1..19: mol_type = other RNA
gattgatatttcacattgt

SEQ ID NO: 4194 - RNA, 19 nt, synthetic construct
  source 1..19: mol_type = other RNA
attgatatttcacattgta

SEQ ID NO: 4195 - RNA, 19 nt, synthetic construct
  source 1..19: mol_type = other RNA
ttgatatttcacattgtat

SEQ ID NO: 4196 - RNA, 19 nt, synthetic construct
  source 1..19: mol_type = other RNA
tgatatttcacattgtatg

SEQ ID NO: 4197 - RNA, 19 nt, synthetic construct
  source 1..19: mol_type = other RNA
gatatttcacattgtatga

SEQ ID NO: 4198 - RNA, 19 nt, synthetic construct
  source 1..19: mol_type = other RNA
atatttcacattgtatgaa

SEQ ID NO: 4199 - RNA, 19 nt, synthetic construct
  source 1..19: mol_type = other RNA
tatttcacattgtatgaaa

SEQ ID NO: 4200 - RNA, 19 nt, synthetic construct
  source 1..19: mol_type = other RNA
atttcacattgtatgaaat

SEQ ID NO: 4201 - RNA, 19 nt, synthetic construct
  source 1..19: mol_type = other RNA
tttcacattgtatgaaata

SEQ ID NO: 4202 - RNA, 19 nt, synthetic construct
  source 1..19: mol_type = other RNA
ttcacattgtatgaaatac

SEQ ID NO: 4203 - RNA, 19 nt, synthetic construct
  source 1..19: mol_type = other RNA
tcacattgtatgaaatacc

SEQ ID NO: 4204 - RNA, 19 nt, synthetic construct
  source 1..19: mol_type = other RNA
cacattgtatgaaatacca

SEQ ID NO: 4205 - RNA, 19 nt, synthetic construct
  source 1..19: mol_type = other RNA
acattgtatgaaataccat

SEQ ID NO: 4206 - RNA, 19 nt, synthetic construct
  source 1..19: mol_type = other RNA
cattgtatgaaataccatg

SEQ ID NO: 4207 - RNA, 19 nt, synthetic construct
  source 1..19: mol_type = other RNA
attgtatgaaataccatgt

SEQ ID NO: 4208 - RNA, 19 nt, synthetic construct
  source 1..19: mol_type = other RNA
ttgtatgaaataccatgtt

SEQ ID NO: 4209 - RNA, 19 nt, synthetic construct
  source 1..19: mol_type = other RNA
tgtatgaaataccatgttt

SEQ ID NO: 4210 - RNA, 19 nt, synthetic construct
  source 1..19: mol_type = other RNA
gtatgaaataccatgtttg

SEQ ID NO: 4211 - RNA, 19 nt, synthetic construct
  source 1..19: mol_type = other RNA
tatgaaataccatgtttga

SEQ ID NO: 4212 - RNA, 19 nt, synthetic construct
  source 1..19: mol_type = other RNA
atgaaataccatgtttgaa

SEQ ID NO: 4213 - RNA, 19 nt, synthetic construct
  source 1..19: mol_type = other RNA
tgaaataccatgtttgaaa

SEQ ID NO: 4214 - RNA, 19 nt, synthetic construct
  source 1..19: mol_type = other RNA
gaaataccatgtttgaaac

SEQ ID NO: 4215 - RNA, 19 nt, synthetic construct
  source 1..19: mol_type = other RNA
aaataccatgtttgaaact

SEQ ID NO: 4216 - RNA, 19 nt, synthetic construct
  source 1..19: mol_type = other RNA
aataccatgtttgaaactc

SEQ ID NO: 4217 - RNA, 19 nt, synthetic construct
  source 1..19: mol_type = other RNA
ataccatgtttgaaactca

SEQ ID NO: 4218 - RNA, 19 nt, synthetic construct
  source 1..19: mol_type = other RNA
taccatgtttgaaactcat

SEQ ID NO: 4219 - RNA, 19 nt, synthetic construct
  source 1..19: mol_type = other RNA
accatgtttgaaactcata

SEQ ID NO: 4220 - RNA, 19 nt, synthetic construct
  source 1..19: mol_type = other RNA
ccatgtttgaaactcatag

SEQ ID NO: 4221 - RNA, 19 nt, synthetic construct
  source 1..19: mol_type = other RNA
catgtttgaaactcatagc

SEQ ID NO: 4222 - RNA, 19 nt, synthetic construct
  source 1..19: mol_type = other RNA
atgtttgaaactcatagca

SEQ ID NO: 4223 - RNA, 19 nt, synthetic construct
  source 1..19: mol_type = other RNA
tgtttgaaactcatagcaa

SEQ ID NO: 4224 - RNA, 19 nt, synthetic construct
  source 1..19: mol_type = other RNA
gtttgaaactcatagcaat

SEQ ID NO: 4225 - RNA, 19 nt, synthetic construct
  source 1..19: mol_type = other RNA
tttgaaactcatagcaata

SEQ ID NO: 4226 - RNA, 19 nt, synthetic construct
  source 1..19: mol_type = other RNA
ttgaaactcatagcaataa

SEQ ID NO: 4227 - RNA, 19 nt, synthetic construct
  source 1..19: mol_type = other RNA
tgaaactcatagcaataat

SEQ ID NO: 4228 - RNA, 19 nt, synthetic construct
  source 1..19: mol_type = other RNA
gaaactcatagcaataatg

SEQ ID NO: 4229 - RNA, 19 nt, synthetic construct
  source 1..19: mol_type = other RNA
aaactcatagcaataatgc

SEQ ID NO: 4230 - RNA, 19 nt, synthetic construct
  source 1..19: mol_type = other RNA
aactcatagcaataatgct

SEQ ID NO: 4231 - RNA, 19 nt, synthetic construct
  source 1..19: mol_type = other RNA
actcatagcaataatgcta

SEQ ID NO: 4232 - RNA, 19 nt, synthetic construct
  source 1..19: mol_type = other RNA
ctcatagcaataatgctat

SEQ ID NO: 4233 - RNA, 19 nt, synthetic construct
  source 1..19: mol_type = other RNA
tcatagcaataatgctatg

SEQ ID NO: 4234 - RNA, 19 nt, synthetic construct
  source 1..19: mol_type = other RNA
catagcaataatgctatgc

SEQ ID NO: 4235 - RNA, 19 nt, synthetic construct
  source 1..19: mol_type = other RNA
atagcaataatgctatgct

SEQ ID NO: 4236 - RNA, 19 nt, synthetic construct
  source 1..19: mol_type = other RNA
tagcaataatgctatgctg

SEQ ID NO: 4237 - RNA, 19 nt, synthetic construct
  source 1..19: mol_type = other RNA
agcaataatgctatgctgt

SEQ ID NO: 4238 - RNA, 19 nt, synthetic construct
  source 1..19: mol_type = other RNA
gcaataatgctatgctgtt

SEQ ID NO: 4239 - RNA, 19 nt, synthetic construct
  source 1..19: mol_type = other RNA
caataatgctatgctgttg

SEQ ID NO: 4240 - RNA, 19 nt, synthetic construct
  source 1..19: mol_type = other RNA
aataatgctatgctgttgt

SEQ ID NO: 4241 - RNA, 19 nt, synthetic construct
  source 1..19: mol_type = other RNA
ataatgctatgctgttgtg

SEQ ID NO: 4242 - RNA, 19 nt, synthetic construct
  source 1..19: mol_type = other RNA
taatgctatgctgttgtga

SEQ ID NO: 4243 - RNA, 19 nt, synthetic construct
  source 1..19: mol_type = other RNA
aatgctatgctgttgtgat

SEQ ID NO: 4244 - RNA, 19 nt, synthetic construct
  source 1..19: mol_type = other RNA
atgctatgctgttgtgatc

SEQ ID NO: 4245 - RNA, 19 nt, synthetic construct
  source 1..19: mol_type = other RNA
tgctatgctgttgtgatcc

SEQ ID NO: 4246 - RNA, 19 nt, synthetic construct
  source 1..19: mol_type = other RNA
gctatgctgttgtgatccc

SEQ ID NO: 4247 - RNA, 19 nt, synthetic construct
  source 1..19: mol_type = other RNA
ctatgctgttgtgatccct

SEQ ID NO: 4248 - RNA, 19 nt, synthetic construct
  source 1..19: mol_type = other RNA
tatgctgttgtgatccctc

SEQ ID NO: 4249 - RNA, 19 nt, synthetic construct
  source 1..19: mol_type = other RNA
atgctgttgtgatccctct

SEQ ID NO: 4250 - RNA, 19 nt, synthetic construct
  source 1..19: mol_type = other RNA
tgctgttgtgatccctctc

SEQ ID NO: 4251 - RNA, 19 nt, synthetic construct
  source 1..19: mol_type = other RNA
gctgttgtgatccctctca

SEQ ID NO: 4252 - RNA, 19 nt, synthetic construct
  source 1..19: mol_type = other RNA
ctgttgtgatccctctcaa

SEQ ID NO: 4253 - RNA, 19 nt, synthetic construct
  source 1..19: mol_type = other RNA
tgttgtgatccctctcaag

SEQ ID NO: 4254 - RNA, 19 nt, synthetic construct
  source 1..19: mol_type = other RNA
gttgtgatccctctcaagt

SEQ ID NO: 4255 - RNA, 19 nt, synthetic construct
  source 1..19: mol_type = other RNA
ttgtgatccctctcaagtt

SEQ ID NO: 4256 - RNA, 19 nt, synthetic construct
  source 1..19: mol_type = other RNA
tgtgatccctctcaagttc

SEQ ID NO: 4257 - RNA, 19 nt, synthetic construct
  source 1..19: mol_type = other RNA
gtgatccctctcaagttct

SEQ ID NO: 4258 - RNA, 19 nt, synthetic construct
  source 1..19: mol_type = other RNA
tgatccctctcaagttctg

SEQ ID NO: 4259 - RNA, 19 nt, synthetic construct
  source 1..19: mol_type = other RNA
gatccctctcaagttctgc

SEQ ID NO: 4260 - RNA, 19 nt, synthetic construct
  source 1..19: mol_type = other RNA
atccctctcaagttctgca

SEQ ID NO: 4261 - RNA, 19 nt, synthetic construct
  source 1..19: mol_type = other RNA
tccctctcaagttctgcat

SEQ ID NO: 4262 - RNA, 19 nt, synthetic construct
  source 1..19: mol_type = other RNA
ccctctcaagttctgcatt

SEQ ID NO: 4263 - RNA, 19 nt, synthetic construct
  source 1..19: mol_type = other RNA
cctctcaagttctgcattt

SEQ ID NO: 4264 - RNA, 19 nt, synthetic construct
  source 1..19: mol_type = other RNA
ctctcaagttctgcattta

SEQ ID NO: 4265 - RNA, 19 nt, synthetic construct
  source 1..19: mol_type = other RNA
tctcaagttctgcatttaa

SEQ ID NO: 4266 - RNA, 19 nt, synthetic construct
  source 1..19: mol_type = other RNA
ctcaagttctgcatttaaa

SEQ ID NO: 4267 - RNA, 19 nt, synthetic construct
  source 1..19: mol_type = other RNA
tcaagttctgcatttaaaa

SEQ ID NO: 4268 - RNA, 19 nt, synthetic construct
  source 1..19: mol_type = other RNA
caagttctgcatttaaaat

SEQ ID NO: 4269 - RNA, 19 nt, synthetic construct
  source 1..19: mol_type = other RNA
aagttctgcatttaaaata

SEQ ID NO: 4270 - RNA, 19 nt, synthetic construct
  source 1..19: mol_type = other RNA
agttctgcatttaaaatat

SEQ ID NO: 4271 - RNA, 19 nt, synthetic construct
  source 1..19: mol_type = other RNA
gttctgcatttaaaatata

SEQ ID NO: 4272 - RNA, 19 nt, synthetic construct
  source 1..19: mol_type = other RNA
ttctgcatttaaaatatat

SEQ ID NO: 4273 - RNA, 19 nt, synthetic construct
  source 1..19: mol_type = other RNA
tctgcatttaaaatatatt

SEQ ID NO: 4274 - RNA, 19 nt, synthetic construct
  source 1..19: mol_type = other RNA
ctgcatttaaaatatattt

SEQ ID NO: 4275 - RNA, 19 nt, synthetic construct
  source 1..19: mol_type = other RNA
tgcatttaaaatatatttt

SEQ ID NO: 4276 - RNA, 19 nt, synthetic construct
  source 1..19: mol_type = other RNA
gcatttaaaatatattttt

SEQ ID NO: 4277 - RNA, 19 nt, synthetic construct
  source 1..19: mol_type = other RNA
catttaaaatatatttttt

SEQ ID NO: 4278 - RNA, 19 nt, synthetic construct
  source 1..19: mol_type = other RNA
atttaaaatatattttttc

SEQ ID NO: 4279 - RNA, 19 nt, synthetic construct
  source 1..19: mol_type = other RNA
tttaaaatatattttttct

SEQ ID NO: 4280 - RNA, 19 nt, synthetic construct
  source 1..19: mol_type = other RNA
ttaaaatatattttttctt

SEQ ID NO: 4281 - RNA, 19 nt, synthetic construct
  source 1..19: mol_type = other RNA
taaaatatattttttcttt

SEQ ID NO: 4282 - RNA, 19 nt, synthetic construct
  source 1..19: mol_type = other RNA
aaaatatattttttcttta

SEQ ID NO: 4283 - RNA, 19 nt, synthetic construct
  source 1..19: mol_type = other RNA
aaatatattttttctttat

SEQ ID NO: 4284 - RNA, 19 nt, synthetic construct
  source 1..19: mol_type = other RNA
aatatattttttctttata

SEQ ID NO: 4285 - RNA, 19 nt, synthetic construct
  source 1..19: mol_type = other RNA
atatattttttctttatag

SEQ ID NO: 4286 - RNA, 19 nt, synthetic construct
  source 1..19: mol_type = other RNA
tatattttttctttatagg

SEQ ID NO: 4287 - RNA, 19 nt, synthetic construct
  source 1..19: mol_type = other RNA
atattttttctttatagga

SEQ ID NO: 4288 - RNA, 19 nt, synthetic construct
  source 1..19: mol_type = other RNA
tattttttctttataggaa

SEQ ID NO: 4289 - RNA, 19 nt, synthetic construct
  source 1..19: mol_type = other RNA
attttttctttataggaat

SEQ ID NO: 4290 - RNA, 19 nt, synthetic construct
  source 1..19: mol_type = other RNA
ttttttctttataggaatt

SEQ ID NO: 4291 - RNA, 19 nt, synthetic construct
  source 1..19: mol_type = other RNA
tttttctttataggaattg

SEQ ID NO: 4292 - RNA, 19 nt, synthetic construct
  source 1..19: mol_type = other RNA
ttttctttataggaattga

SEQ ID NO: 4293 - RNA, 19 nt, synthetic construct
  source 1..19: mol_type = other RNA
tttctttataggaattgat

SEQ ID NO: 4294 - RNA, 19 nt, synthetic construct
  source 1..19: mol_type = other RNA
ttctttataggaattgatg

SEQ ID NO: 4295 - RNA, 19 nt, synthetic construct
  source 1..19: mol_type = other RNA
tctttataggaattgatgt

SEQ ID NO: 4296 - RNA, 19 nt, synthetic construct
  source 1..19: mol_type = other RNA
ctttataggaattgatgta

SEQ ID NO: 4297 - RNA, 19 nt, synthetic construct
  source 1..19: mol_type = other RNA
tttataggaattgatgtat

SEQ ID NO: 4298 - RNA, 19 nt, synthetic construct
  source 1..19: mol_type = other RNA
ttataggaattgatgtata

SEQ ID NO: 4299 - RNA, 19 nt, synthetic construct
  source 1..19: mol_type = other RNA
tataggaattgatgtatac

SEQ ID NO: 4300 - RNA, 19 nt, synthetic construct
  source 1..19: mol_type = other RNA
ataggaattgatgtatacc

SEQ ID NO: 4301 - RNA, 19 nt, synthetic construct
  source 1..19: mol_type = other RNA
taggaattgatgtatacca

SEQ ID NO: 4302 - RNA, 19 nt, synthetic construct
  source 1..19: mol_type = other RNA
aggaattgatgtataccat

SEQ ID NO: 4303 - RNA, 19 nt, synthetic construct
  source 1..19: mol_type = other RNA
ggaattgatgtataccatg

SEQ ID NO: 4304 - RNA, 19 nt, synthetic construct
  source 1..19: mol_type = other RNA
gaattgatgtataccatga

SEQ ID NO: 4305 - RNA, 19 nt, synthetic construct
  source 1..19: mol_type = other RNA
aattgatgtataccatgaa

SEQ ID NO: 4306 - RNA, 19 nt, synthetic construct
  source 1..19: mol_type = other RNA
attgatgtataccatgaag

SEQ ID NO: 4307 - RNA, 19 nt, synthetic construct
  source 1..19: mol_type = other RNA
ttgatgtataccatgaagt

SEQ ID NO: 4308 - RNA, 19 nt, synthetic construct
  source 1..19: mol_type = other RNA
tgatgtataccatgaagtc

SEQ ID NO: 4309 - RNA, 19 nt, synthetic construct
  source 1..19: mol_type = other RNA
gatgtataccatgaagtca

SEQ ID NO: 4310 - RNA, 19 nt, synthetic construct
  source 1..19: mol_type = other RNA
atgtataccatgaagtcat

SEQ ID NO: 4311 - RNA, 19 nt, synthetic construct
  source 1..19: mol_type = other RNA
tgtataccatgaagtcatt

SEQ ID NO: 4312 - RNA, 19 nt, synthetic construct
  source 1..19: mol_type = other RNA
gtataccatgaagtcattg

SEQ ID NO: 4313 - RNA, 19 nt, synthetic construct
  source 1..19: mol_type = other RNA
tataccatgaagtcattgt

SEQ ID NO: 4314 - RNA, 19 nt, synthetic construct
  source 1..19: mol_type = other RNA
ataccatgaagtcattgtc

SEQ ID NO: 4315 - RNA, 19 nt, synthetic construct
  source 1..19: mol_type = other RNA
taccatgaagtcattgtca

SEQ ID NO: 4316 - RNA, 19 nt, synthetic construct
  source 1..19: mol_type = other RNA
accatgaagtcattgtcag

SEQ ID NO: 4317 - RNA, 19 nt, synthetic construct
  source 1..19: mol_type = other RNA
ccatgaagtcattgtcagt

SEQ ID NO: 4318 - RNA, 19 nt, synthetic construct
  source 1..19: mol_type = other RNA
catgaagtcattgtcagtt

SEQ ID NO: 4319 - RNA, 19 nt, synthetic construct
  source 1..19: mol_type = other RNA
atgaagtcattgtcagttg

SEQ ID NO: 4320 - RNA, 19 nt, synthetic construct
  source 1..19: mol_type = other RNA
tgaagtcattgtcagttgt

SEQ ID NO: 4321 - RNA, 19 nt, synthetic construct
  source 1..19: mol_type = other RNA
gaagtcattgtcagttgta

SEQ ID NO: 4322 - RNA, 19 nt, synthetic construct
  source 1..19: mol_type = other RNA
aagtcattgtcagttgtag

SEQ ID NO: 4323 - RNA, 19 nt, synthetic construct
  source 1..19: mol_type = other RNA
agtcattgtcagttgtagt

SEQ ID NO: 4324 - RNA, 19 nt, synthetic construct
  source 1..19: mol_type = other RNA
gtcattgtcagttgtagta

SEQ ID NO: 4325 - RNA, 19 nt, synthetic construct
  source 1..19: mol_type = other RNA
tcattgtcagttgtagtag

SEQ ID NO: 4326 - RNA, 19 nt, synthetic construct
  source 1..19: mol_type = other RNA
cattgtcagttgtagtagc

SEQ ID NO: 4327 - RNA, 19 nt, synthetic construct
  source 1..19: mol_type = other RNA
attgtcagttgtagtagct

SEQ ID NO: 4328 - RNA, 19 nt, synthetic construct
  source 1..19: mol_type = other RNA
ttgtcagttgtagtagctc

SEQ ID NO: 4329 - RNA, 19 nt, synthetic construct
  source 1..19: mol_type = other RNA
tgtcagttgtagtagctct

SEQ ID NO: 4330 - RNA, 19 nt, synthetic construct
  source 1..19: mol_type = other RNA
gtcagttgtagtagctctg

SEQ ID NO: 4331 - RNA, 19 nt, synthetic construct
  source 1..19: mol_type = other RNA
tcagttgtagtagctctga

SEQ ID NO: 4332 - RNA, 19 nt, synthetic construct
  source 1..19: mol_type = other RNA
cagttgtagtagctctgat

SEQ ID NO: 4333 - RNA, 19 nt, synthetic construct
  source 1..19: mol_type = other RNA
agttgtagtagctctgatg

SEQ ID NO: 4334 - RNA, 19 nt, synthetic construct
  source 1..19: mol_type = other RNA
gttgtagtagctctgatgt

SEQ ID NO: 4335 - RNA, 19 nt, synthetic construct
  source 1..19: mol_type = other RNA
ttgtagtagctctgatgtt

SEQ ID NO: 4336 - RNA, 19 nt, synthetic construct
  source 1..19: mol_type = other RNA
tgtagtagctctgatgttg

SEQ ID NO: 4337 - RNA, 19 nt, synthetic construct
  source 1..19: mol_type = other RNA
gtagtagctctgatgttga

SEQ ID NO: 4338 - RNA, 19 nt, synthetic construct
  source 1..19: mol_type = other RNA
tagtagctctgatgttgaa

SEQ ID NO: 4339 - RNA, 19 nt, synthetic construct
  source 1..19: mol_type = other RNA
agtagctctgatgttgaat

SEQ ID NO: 4340 - RNA, 19 nt, synthetic construct
  source 1..19: mol_type = other RNA
gtagctctgatgttgaatg

SEQ ID NO: 4341 - RNA, 19 nt, synthetic construct
  source 1..19: mol_type = other RNA
tagctctgatgttgaatga

SEQ ID NO: 4342 - RNA, 19 nt, synthetic construct
  source 1..19: mol_type = other RNA
agctctgatgttgaatgag

SEQ ID NO: 4343 - RNA, 19 nt, synthetic construct
  source 1..19: mol_type = other RNA
gctctgatgttgaatgaga

SEQ ID NO: 4344 - RNA, 19 nt, synthetic construct
  source 1..19: mol_type = other RNA
ctctgatgttgaatgagat

SEQ ID NO: 4345 - RNA, 19 nt, synthetic construct
  source 1..19: mol_type = other RNA
tctgatgttgaatgagata

SEQ ID NO: 4346 - RNA, 19 nt, synthetic construct
  source 1..19: mol_type = other RNA
ctgatgttgaatgagatat

SEQ ID NO: 4347 - RNA, 19 nt, synthetic construct
  source 1..19: mol_type = other RNA
tgatgttgaatgagatatc

SEQ ID NO: 4348 - RNA, 19 nt, synthetic construct
  source 1..19: mol_type = other RNA
gatgttgaatgagatatca

SEQ ID NO: 4349 - RNA, 19 nt, synthetic construct
  source 1..19: mol_type = other RNA
atgttgaatgagatatcat

SEQ ID NO: 4350 - RNA, 19 nt, synthetic construct
  source 1..19: mol_type = other RNA
tgttgaatgagatatcatg

SEQ ID NO: 4351 - RNA, 19 nt, synthetic construct
  source 1..19: mol_type = other RNA
gttgaatgagatatcatgt

SEQ ID NO: 4352 - RNA, 19 nt, synthetic construct
  source 1..19: mol_type = other RNA
ttgaatgagatatcatgtt

SEQ ID NO: 4353 - RNA, 19 nt, synthetic construct
  source 1..19: mol_type = other RNA
tgaatgagatatcatgttt

SEQ ID NO: 4354 - RNA, 19 nt, synthetic construct
  source 1..19: mol_type = other RNA
gaatgagatatcatgtttt

SEQ ID NO: 4355 - RNA, 19 nt, synthetic construct
  source 1..19: mol_type = other RNA
aatgagatatcatgtttta

SEQ ID NO: 4356 - RNA, 19 nt, synthetic construct
  source 1..19: mol_type = other RNA
atgagatatcatgttttag

SEQ ID NO: 4357 - RNA, 19 nt, synthetic construct
  source 1..19: mol_type = other RNA
tgagatatcatgttttagc

SEQ ID NO: 4358 - RNA, 19 nt, synthetic construct
  source 1..19: mol_type = other RNA
gagatatcatgttttagca

SEQ ID NO: 4359 - RNA, 19 nt, synthetic construct
  source 1..19: mol_type = other RNA
agatatcatgttttagcat

SEQ ID NO: 4360 - RNA, 19 nt, synthetic construct
  source 1..19: mol_type = other RNA
gatatcatgttttagcatt

SEQ ID NO: 4361 - RNA, 19 nt, synthetic construct
  source 1..19: mol_type = other RNA
atatcatgttttagcattc

SEQ ID NO: 4362 - RNA, 19 nt, synthetic construct
  source 1..19: mol_type = other RNA
tatcatgttttagcattcc

SEQ ID NO: 4363 - RNA, 19 nt, synthetic construct
  source 1..19: mol_type = other RNA
atcatgttttagcattcca

SEQ ID NO: 4364 - RNA, 19 nt, synthetic construct
  source 1..19: mol_type = other RNA
tcatgttttagcattccat

SEQ ID NO: 4365 - RNA, 19 nt, synthetic construct
  source 1..19: mol_type = other RNA
catgttttagcattccatt

SEQ ID NO: 4366 - RNA, 19 nt, synthetic construct
  source 1..19: mol_type = other RNA
atgttttagcattccattt

SEQ ID NO: 4367 - RNA, 19 nt, synthetic construct
  source 1..19: mol_type = other RNA
tgttttagcattccatttt

SEQ ID NO: 4368 - RNA, 19 nt, synthetic construct
  source 1..19: mol_type = other RNA
gttttagcattccatttta

SEQ ID NO: 4369 - RNA, 19 nt, synthetic construct
  source 1..19: mol_type = other RNA
ttttagcattccattttac

SEQ ID NO: 4370 - RNA, 19 nt, synthetic construct
  source 1..19: mol_type = other RNA
tttagcattccattttact

SEQ ID NO: 4371 - RNA, 19 nt, synthetic construct
  source 1..19: mol_type = other RNA
ttagcattccattttactg

SEQ ID NO: 4372 - RNA, 19 nt, synthetic construct
  source 1..19: mol_type = other RNA
tagcattccattttactga

SEQ ID NO: 4373 - RNA, 19 nt, synthetic construct
  source 1..19: mol_type = other RNA
agcattccattttactgac

SEQ ID NO: 4374 - RNA, 19 nt, synthetic construct
  source 1..19: mol_type = other RNA
gcattccattttactgact

SEQ ID NO: 4375 - RNA, 19 nt, synthetic construct
  source 1..19: mol_type = other RNA
cattccattttactgacta

SEQ ID NO: 4376 - RNA, 19 nt, synthetic construct
  source 1..19: mol_type = other RNA
attccattttactgactag

SEQ ID NO: 4377 - RNA, 19 nt, synthetic construct
  source 1..19: mol_type = other RNA
ttccattttactgactagg

SEQ ID NO: 4378 - RNA, 19 nt, synthetic construct
  source 1..19: mol_type = other RNA
tccattttactgactaggg

SEQ ID NO: 4379 - RNA, 19 nt, synthetic construct
  source 1..19: mol_type = other RNA
ccattttactgactagggt

SEQ ID NO: 4380 - RNA, 19 nt, synthetic construct
  source 1..19: mol_type = other RNA
cattttactgactagggta

SEQ ID NO: 4381 - RNA, 19 nt, synthetic construct
  source 1..19: mol_type = other RNA
attttactgactagggtag

SEQ ID NO: 4382 - RNA, 19 nt, synthetic construct
  source 1..19: mol_type = other RNA
ttttactgactagggtaga

SEQ ID NO: 4383 - RNA, 19 nt, synthetic construct
  source 1..19: mol_type = other RNA
tttactgactagggtagaa

SEQ ID NO: 4384 - RNA, 19 nt, synthetic construct
  source 1..19: mol_type = other RNA
ttactgactagggtagaag

SEQ ID NO: 4385 - RNA, 19 nt, synthetic construct
  source 1..19: mol_type = other RNA
tactgactagggtagaaga

SEQ ID NO: 4386 - RNA, 19 nt, synthetic construct
  source 1..19: mol_type = other RNA
actgactagggtagaagaa

SEQ ID NO: 4387 - RNA, 19 nt, synthetic construct
  source 1..19: mol_type = other RNA
ctgactagggtagaagaac

SEQ ID NO: 4388 - RNA, 19 nt, synthetic construct
  source 1..19: mol_type = other RNA
tgactagggtagaagaaca

SEQ ID NO: 4389 - RNA, 19 nt, synthetic construct
  source 1..19: mol_type = other RNA
gactagggtagaagaacac

SEQ ID NO: 4390 - RNA, 19 nt, synthetic construct
  source 1..19: mol_type = other RNA
actagggtagaagaacact

SEQ ID NO: 4391 - RNA, 19 nt, synthetic construct
  source 1..19: mol_type = other RNA
ctagggtagaagaacactt

SEQ ID NO: 4392 - RNA, 19 nt, synthetic construct
  source 1..19: mol_type = other RNA
tagggtagaagaacacttt

SEQ ID NO: 4393 - RNA, 19 nt, synthetic construct
  source 1..19: mol_type = other RNA
agggtagaagaacactttt

SEQ ID NO: 4394 - RNA, 19 nt, synthetic construct
  source 1..19: mol_type = other RNA
gggtagaagaacacttttc

SEQ ID NO: 4395 - RNA, 19 nt, synthetic construct
  source 1..19: mol_type = other RNA
ggtagaagaacacttttct

SEQ ID NO: 4396 - RNA, 19 nt, synthetic construct
  source 1..19: mol_type = other RNA
gtagaagaacacttttctt

SEQ ID NO: 4397 - RNA, 19 nt, synthetic construct
  source 1..19: mol_type = other RNA
tagaagaacacttttcttg

SEQ ID NO: 4398 - RNA, 19 nt, synthetic construct
  source 1..19: mol_type = other RNA
agaagaacacttttcttgg

SEQ ID NO: 4399 - RNA, 19 nt, synthetic construct
  source 1..19: mol_type = other RNA
gaagaacacttttcttggc

SEQ ID NO: 4400 - RNA, 19 nt, synthetic construct
  source 1..19: mol_type = other RNA
aagaacacttttcttggct

SEQ ID NO: 4401 - RNA, 19 nt, synthetic construct
  source 1..19: mol_type = other RNA
agaacacttttcttggcta

SEQ ID NO: 4402 - RNA, 19 nt, synthetic construct
  source 1..19: mol_type = other RNA
gaacacttttcttggctac

SEQ ID NO: 4403 - RNA, 19 nt, synthetic construct
  source 1..19: mol_type = other RNA
aacacttttcttggctaca

SEQ ID NO: 4404 - RNA, 19 nt, synthetic construct
  source 1..19: mol_type = other RNA
acacttttcttggctacat

SEQ ID NO: 4405 - RNA, 19 nt, synthetic construct
  source 1..19: mol_type = other RNA
cacttttcttggctacatt

SEQ ID NO: 4406 - RNA, 19 nt, synthetic construct
  source 1..19: mol_type = other RNA
acttttcttggctacattt

SEQ ID NO: 4407 - RNA, 19 nt, synthetic construct
  source 1..19: mol_type = other RNA
cttttcttggctacatttg

SEQ ID NO: 4408 - RNA, 19 nt, synthetic construct
  source 1..19: mol_type = other RNA
ttttcttggctacatttgg

SEQ ID NO: 4409 - RNA, 19 nt, synthetic construct
  source 1..19: mol_type = other RNA
tttcttggctacatttgga

SEQ ID NO: 4410 - RNA, 19 nt, synthetic construct
  source 1..19: mol_type = other RNA
ttcttggctacatttggag

SEQ ID NO: 4411 - RNA, 19 nt, synthetic construct
  source 1..19: mol_type = other RNA
tcttggctacatttggagg

SEQ ID NO: 4412 - RNA, 19 nt, synthetic construct
  source 1..19: mol_type = other RNA
cttggctacatttggagga

SEQ ID NO: 4413 - RNA, 19 nt, synthetic construct
  source 1..19: mol_type = other RNA
ttggctacatttggaggat

SEQ ID NO: 4414 - RNA, 19 nt, synthetic construct
  source 1..19: mol_type = other RNA
tggctacatttggaggata

SEQ ID NO: 4415 - RNA, 19 nt, synthetic construct
  source 1..19: mol_type = other RNA
ggctacatttggaggatac

SEQ ID NO: 4416 - RNA, 19 nt, synthetic construct
  source 1..19: mol_type = other RNA
gctacatttggaggatacc

SEQ ID NO: 4417 - RNA, 19 nt, synthetic construct
  source 1..19: mol_type = other RNA
ctacatttggaggataccc

SEQ ID NO: 4418 - RNA, 19 nt, synthetic construct
  source 1..19: mol_type = other RNA
tacatttggaggataccca

SEQ ID NO: 4419 - RNA, 19 nt, synthetic construct
  source 1..19: mol_type = other RNA
acatttggaggatacccag

SEQ ID NO: 4420 - RNA, 19 nt, synthetic construct
  source 1..19: mol_type = other RNA
catttggaggatacccagg

SEQ ID NO: 4421 - RNA, 19 nt, synthetic construct
  source 1..19: mol_type = other RNA
atttggaggatacccaggg

SEQ ID NO: 4422 - RNA, 19 nt, synthetic construct
  source 1..19: mol_type = other RNA
tttggaggatacccaggga

SEQ ID NO: 4423 - RNA, 19 nt, synthetic construct
  source 1..19: mol_type = other RNA
ttggaggatacccagggag

SEQ ID NO: 4424 - RNA, 19 nt, synthetic construct
  source 1..19: mol_type = other RNA
tggaggatacccagggagt

SEQ ID NO: 4425 - RNA, 19 nt, synthetic construct
  source 1..19: mol_type = other RNA
ggaggatacccagggagtc

SEQ ID NO: 4426 - RNA, 19 nt, synthetic construct
  source 1..19: mol_type = other RNA
gaggatacccagggagtct

SEQ ID NO: 4427 - RNA, 19 nt, synthetic construct
  source 1..19: mol_type = other RNA
aggatacccagggagtctt

SEQ ID NO: 4428 - RNA, 19 nt, synthetic construct
  source 1..19: mol_type = other RNA
ggatacccagggagtcttg

SEQ ID NO: 4429 - RNA, 19 nt, synthetic construct
  source 1..19: mol_type = other RNA
gatacccagggagtcttgg

SEQ ID NO: 4430 - RNA, 19 nt, synthetic construct
  source 1..19: mol_type = other RNA
atacccagggagtcttggg

SEQ ID NO: 4431 - RNA, 19 nt, synthetic construct
  source 1..19: mol_type = other RNA
tacccagggagtcttgggt

SEQ ID NO: 4432 - RNA, 19 nt, synthetic construct
  source 1..19: mol_type = other RNA
acccagggagtcttgggtg

SEQ ID NO: 4433 - RNA, 19 nt, synthetic construct
  source 1..19: mol_type = other RNA
cccagggagtcttgggtgt

SEQ ID NO: 4434 - RNA, 19 nt, synthetic construct
  source 1..19: mol_type = other RNA
ccagggagtcttgggtgtt

SEQ ID NO: 4435 - RNA, 19 nt, synthetic construct
  source 1..19: mol_type = other RNA
cagggagtcttgggtgttc

SEQ ID NO: 4436 - RNA, 19 nt, synthetic construct
  source 1..19: mol_type = other RNA
agggagtcttgggtgttcc

SEQ ID NO: 4437 - RNA, 19 nt, synthetic construct
  source 1..19: mol_type = other RNA
gggagtcttgggtgttcct

SEQ ID NO: 4438 - RNA, 19 nt, synthetic construct
  source 1..19: mol_type = other RNA
ggagtcttgggtgttcctt

SEQ ID NO: 4439 - RNA, 19 nt, synthetic construct
  source 1..19: mol_type = other RNA
gagtcttgggtgttcctta

SEQ ID NO: 4440 - RNA, 19 nt, synthetic construct
  source 1..19: mol_type = other RNA
agtcttgggtgttccttat

SEQ ID NO: 4441 - RNA, 19 nt, synthetic construct
  source 1..19: mol_type = other RNA
gtcttgggtgttccttatc

SEQ ID NO: 4442 - RNA, 19 nt, synthetic construct
  source 1..19: mol_type = other RNA
tcttgggtgttccttatct

SEQ ID NO: 4443 - RNA, 19 nt, synthetic construct
  source 1..19: mol_type = other RNA
cttgggtgttccttatctg

SEQ ID NO: 4444 - RNA, 19 nt, synthetic construct
  source 1..19: mol_type = other RNA
ttgggtgttccttatctgg

SEQ ID NO: 4445 - RNA, 19 nt, synthetic construct
  source 1..19: mol_type = other RNA
tgggtgttccttatctggg

SEQ ID NO: 4446 - RNA, 19 nt, synthetic construct
  source 1..19: mol_type = other RNA
gggtgttccttatctgggg

SEQ ID NO: 4447 - RNA, 19 nt, synthetic construct
  source 1..19: mol_type = other RNA
ggtgttccttatctgggga

SEQ ID NO: 4448 - RNA, 19 nt, synthetic construct
  source 1..19: mol_type = other RNA
gtgttccttatctggggaa

SEQ ID NO: 4449 - RNA, 19 nt, synthetic construct
  source 1..19: mol_type = other RNA
tgttccttatctggggaag

SEQ ID NO: 4450 - RNA, 19 nt, synthetic construct
  source 1..19: mol_type = other RNA
gttccttatctggggaagc

SEQ ID NO: 4451 - RNA, 19 nt, synthetic construct
  source 1..19: mol_type = other RNA
ttccttatctggggaagca

SEQ ID NO: 4452 - RNA, 19 nt, synthetic construct
  source 1..19: mol_type = other RNA
tccttatctggggaagcaa

SEQ ID NO: 4453 - RNA, 19 nt, synthetic construct
  source 1..19: mol_type = other RNA
ccttatctggggaagcaaa

SEQ ID NO: 4454 - RNA, 19 nt, synthetic construct
  source 1..19: mol_type = other RNA
cttatctggggaagcaaac

SEQ ID NO: 4455 - RNA, 19 nt, synthetic construct
  source 1..19: mol_type = other RNA
ttatctggggaagcaaaca

SEQ ID NO: 4456 - RNA, 19 nt, synthetic construct
  source 1..19: mol_type = other RNA
tatctggggaagcaaacat

SEQ ID NO: 4457 - RNA, 19 nt, synthetic construct
  source 1..19: mol_type = other RNA
atctggggaagcaaacatt

SEQ ID NO: 4458 - RNA, 19 nt, synthetic construct
  source 1..19: mol_type = other RNA
tctggggaagcaaacattt

SEQ ID NO: 4459 - RNA, 19 nt, synthetic construct
  source 1..19: mol_type = other RNA
ctggggaagcaaacatttc

SEQ ID NO: 4460 - RNA, 19 nt, synthetic construct
  source 1..19: mol_type = other RNA
tggggaagcaaacatttca

SEQ ID NO: 4461 - RNA, 19 nt, synthetic construct
  source 1..19: mol_type = other RNA
ggggaagcaaacatttcac

SEQ ID NO: 4462 - RNA, 19 nt, synthetic construct
  source 1..19: mol_type = other RNA
gggaagcaaacatttcact

SEQ ID NO: 4463 - RNA, 19 nt, synthetic construct
  source 1..19: mol_type = other RNA
ggaagcaaacatttcacta

SEQ ID NO: 4464 - RNA, 19 nt, synthetic construct
  source 1..19: mol_type = other RNA
gaagcaaacatttcactag

SEQ ID NO: 4465 - RNA, 19 nt, synthetic construct
  source 1..19: mol_type = other RNA
aagcaaacatttcactagt

SEQ ID NO: 4466 - RNA, 19 nt, synthetic construct
  source 1..19: mol_type = other RNA
agcaaacatttcactagtc

SEQ ID NO: 4467 - RNA, 19 nt, synthetic construct
  source 1..19: mol_type = other RNA
gcaaacatttcactagtct

SEQ ID NO: 4468 - RNA, 19 nt, synthetic construct
  source 1..19: mol_type = other RNA
caaacatttcactagtctc

SEQ ID NO: 4469 - RNA, 19 nt, synthetic construct
  source 1..19: mol_type = other RNA
aaacatttcactagtctct

SEQ ID NO: 4470 - RNA, 19 nt, synthetic construct
  source 1..19: mol_type = other RNA
aacatttcactagtctctt

SEQ ID NO: 4471 - RNA, 19 nt, synthetic construct
  source 1..19: mol_type = other RNA
acatttcactagtctcttt

SEQ ID NO: 4472 - RNA, 19 nt, synthetic construct
  source 1..19: mol_type = other RNA
catttcactagtctctttt

SEQ ID NO: 4473 - RNA, 19 nt, synthetic construct
  source 1..19: mol_type = other RNA
atttcactagtctcttttt

SEQ ID NO: 4474 - RNA, 19 nt, synthetic construct
  source 1..19: mol_type = other RNA
tttcactagtctctttttt

SEQ ID NO: 4475 - RNA, 19 nt, synthetic construct
  source 1..19: mol_type = other RNA
ttcactagtctcttttttt

SEQ ID NO: 4476 - RNA, 19 nt, synthetic construct
  source 1..19: mol_type = other RNA
tcactagtctctttttttc

SEQ ID NO: 4477 - RNA, 19 nt, synthetic construct
  source 1..19: mol_type = other RNA
cactagtctctttttttca

SEQ ID NO: 4478 - RNA, 19 nt, synthetic construct
  source 1..19: mol_type = other RNA
actagtctctttttttcat

SEQ ID NO: 4479 - RNA, 19 nt, synthetic construct
  source 1..19: mol_type = other RNA
ctagtctctttttttcatc

SEQ ID NO: 4480 - RNA, 19 nt, synthetic construct
  source 1..19: mol_type = other RNA
tagtctctttttttcatcc

SEQ ID NO: 4481 - RNA, 19 nt, synthetic construct
  source 1..19: mol_type = other RNA
agtctctttttttcatcct

SEQ ID NO: 4482 - RNA, 19 nt, synthetic construct
  source 1..19: mol_type = other RNA
gtctctttttttcatcctt

SEQ ID NO: 4483 - RNA, 19 nt, synthetic construct
  source 1..19: mol_type = other RNA
tctctttttttcatccttt

SEQ ID NO: 4484 - RNA, 19 nt, synthetic construct
  source 1..19: mol_type = other RNA
ctctttttttcatccttta

SEQ ID NO: 4485 - RNA, 19 nt, synthetic construct
  source 1..19: mol_type = other RNA
tctttttttcatcctttaa

SEQ ID NO: 4486 - RNA, 19 nt, synthetic construct
  source 1..19: mol_type = other RNA
ctttttttcatcctttaaa

SEQ ID NO: 4487 - RNA, 19 nt, synthetic construct
  source 1..19: mol_type = other RNA
tttttttcatcctttaaat

SEQ ID NO: 4488 - RNA, 19 nt, synthetic construct
  source 1..19: mol_type = other RNA
ttttttcatcctttaaatt

SEQ ID NO: 4489 - RNA, 19 nt, synthetic construct
  source 1..19: mol_type = other RNA
tttttcatcctttaaattg

SEQ ID NO: 4490 - RNA, 19 nt, synthetic construct
  source 1..19: mol_type = other RNA
ttttcatcctttaaattgt

SEQ ID NO: 4491 - RNA, 19 nt, synthetic construct
  source 1..19: mol_type = other RNA
tttcatcctttaaattgta

SEQ ID NO: 4492 - RNA, 19 nt, synthetic construct
  source 1..19: mol_type = other RNA
ttcatcctttaaattgtaa

SEQ ID NO: 4493 - RNA, 19 nt, synthetic construct
  source 1..19: mol_type = other RNA
tcatcctttaaattgtaaa

SEQ ID NO: 4494 - RNA, 19 nt, synthetic construct
  source 1..19: mol_type = other RNA
catcctttaaattgtaaat

SEQ ID NO: 4495 - RNA, 19 nt, synthetic construct
  source 1..19: mol_type = other RNA
atcctttaaattgtaaatt

SEQ ID NO: 4496 - RNA, 19 nt, synthetic construct
  source 1..19: mol_type = other RNA
tcctttaaattgtaaatta

SEQ ID NO: 4497 - RNA, 19 nt, synthetic construct
  source 1..19: mol_type = other RNA
cctttaaattgtaaattaa

SEQ ID NO: 4498 - RNA, 19 nt, synthetic construct
  source 1..19: mol_type = other RNA
ctttaaattgtaaattaag

SEQ ID NO: 4499 - RNA, 19 nt, synthetic construct
  source 1..19: mol_type = other RNA
tttaaattgtaaattaagg

SEQ ID NO: 4500 - RNA, 19 nt, synthetic construct
  source 1..19: mol_type = other RNA
ttaaattgtaaattaagga

SEQ ID NO: 4501 - RNA, 19 nt, synthetic construct
  source 1..19: mol_type = other RNA
taaattgtaaattaaggat

SEQ ID NO: 4502 - RNA, 19 nt, synthetic construct
  source 1..19: mol_type = other RNA
aaattgtaaattaaggatt

SEQ ID NO: 4503 - RNA, 19 nt, synthetic construct
  source 1..19: mol_type = other RNA
aattgtaaattaaggatta

SEQ ID NO: 4504 - RNA, 19 nt, synthetic construct
  source 1..19: mol_type = other RNA
attgtaaattaaggattac

SEQ ID NO: 4505 - RNA, 19 nt, synthetic construct
  source 1..19: mol_type = other RNA
ttgtaaattaaggattact

SEQ ID NO: 4506 - RNA, 19 nt, synthetic construct
  source 1..19: mol_type = other RNA
tgtaaattaaggattactc

SEQ ID NO: 4507 - RNA, 19 nt, synthetic construct
  source 1..19: mol_type = other RNA
gtaaattaaggattactca

SEQ ID NO: 4508 - RNA, 19 nt, synthetic construct
  source 1..19: mol_type = other RNA
taaattaaggattactcaa

SEQ ID NO: 4509 - RNA, 19 nt, synthetic construct
  source 1..19: mol_type = other RNA
aaattaaggattactcaag

SEQ ID NO: 4510 - RNA, 19 nt, synthetic construct
  source 1..19: mol_type = other RNA
aattaaggattactcaagc

SEQ ID NO: 4511 - RNA, 19 nt, synthetic construct
  source 1..19: mol_type = other RNA
attaaggattactcaagct

SEQ ID NO: 4512 - RNA, 19 nt, synthetic construct
  source 1..19: mol_type = other RNA
ttaaggattactcaagctc

SEQ ID NO: 4513 - RNA, 19 nt, synthetic construct
  source 1..19: mol_type = other RNA
taaggattactcaagctca

SEQ ID NO: 4514 - RNA, 19 nt, synthetic construct
  source 1..19: mol_type = other RNA
aaggattactcaagctcac

SEQ ID NO: 4515 - RNA, 19 nt, synthetic construct
  source 1..19: mol_type = other RNA
aggattactcaagctcacc

SEQ ID NO: 4516 - RNA, 19 nt, synthetic construct
  source 1..19: mol_type = other RNA
ggattactcaagctcacca

SEQ ID NO: 4517 - RNA, 19 nt, synthetic construct
  source 1..19: mol_type = other RNA
gattactcaagctcaccat

SEQ ID NO: 4518 - RNA, 19 nt, synthetic construct
  source 1..19: mol_type = other RNA
attactcaagctcaccatt

SEQ ID NO: 4519 - RNA, 19 nt, synthetic construct
  source 1..19: mol_type = other RNA
ttactcaagctcaccatta

SEQ ID NO: 4520 - RNA, 19 nt, synthetic construct
  source 1..19: mol_type = other RNA
tactcaagctcaccattat

SEQ ID NO: 4521 - RNA, 19 nt, synthetic construct
  source 1..19: mol_type = other RNA
actcaagctcaccattatt

SEQ ID NO: 4522 - RNA, 19 nt, synthetic construct
  source 1..19: mol_type = other RNA
ctcaagctcaccattattc

SEQ ID NO: 4523 - RNA, 19 nt, synthetic construct
  source 1..19: mol_type = other RNA
tcaagctcaccattattca

SEQ ID NO: 4524 - RNA, 19 nt, synthetic construct
  source 1..19: mol_type = other RNA
caagctcaccattattcaa

SEQ ID NO: 4525 - RNA, 19 nt, synthetic construct
  source 1..19: mol_type = other RNA
aagctcaccattattcaag

SEQ ID NO: 4526 - RNA, 19 nt, synthetic construct
  source 1..19: mol_type = other RNA
agctcaccattattcaaga

SEQ ID NO: 4527 - RNA, 19 nt, synthetic construct
  source 1..19: mol_type = other RNA
gctcaccattattcaagat

SEQ ID NO: 4528 - RNA, 19 nt, synthetic construct
  source 1..19: mol_type = other RNA
ctcaccattattcaagatt

SEQ ID NO: 4529 - RNA, 19 nt, synthetic construct
  source 1..19: mol_type = other RNA
tcaccattattcaagattg

SEQ ID NO: 4530 - RNA, 19 nt, synthetic construct
  source 1..19: mol_type = other RNA
caccattattcaagattgg

SEQ ID NO: 4531 - RNA, 19 nt, synthetic construct
  source 1..19: mol_type = other RNA
accattattcaagattggg

SEQ ID NO: 4532 - RNA, 19 nt, synthetic construct
  source 1..19: mol_type = other RNA
ccattattcaagattggga

SEQ ID NO: 4533 - RNA, 19 nt, synthetic construct
  source 1..19: mol_type = other RNA
cattattcaagattgggac

SEQ ID NO: 4534 - RNA, 19 nt, synthetic construct
  source 1..19: mol_type = other RNA
attattcaagattgggact

SEQ ID NO: 4535 - RNA, 19 nt, synthetic construct
  source 1..19: mol_type = other RNA
ttattcaagattgggactc

SEQ ID NO: 4536 - RNA, 19 nt, synthetic construct
  source 1..19: mol_type = other RNA
tattcaagattgggactcg

SEQ ID NO: 4537 - RNA, 19 nt, synthetic construct
  source 1..19: mol_type = other RNA
attcaagattgggactcgc

SEQ ID NO: 4538 - RNA, 19 nt, synthetic construct
  source 1..19: mol_type = other RNA
ttcaagattgggactcgct

SEQ ID NO: 4539 - RNA, 19 nt, synthetic construct
  source 1..19: mol_type = other RNA
tcaagattgggactcgctt

SEQ ID NO: 4540 - RNA, 19 nt, synthetic construct
  source 1..19: mol_type = other RNA
caagattgggactcgcttc

SEQ ID NO: 4541 - RNA, 19 nt, synthetic construct
  source 1..19: mol_type = other RNA
aagattgggactcgcttcc

SEQ ID NO: 4542 - RNA, 19 nt, synthetic construct
  source 1..19: mol_type = other RNA
agattgggactcgcttccc

SEQ ID NO: 4543 - RNA, 19 nt, synthetic construct
  source 1..19: mol_type = other RNA
gattgggactcgcttccca

SEQ ID NO: 4544 - RNA, 19 nt, synthetic construct
  source 1..19: mol_type = other RNA
attgggactcgcttcccag

SEQ ID NO: 4545 - RNA, 19 nt, synthetic construct
  source 1..19: mol_type = other RNA
ttgggactcgcttcccagt

SEQ ID NO: 4546 - RNA, 19 nt, synthetic construct
  source 1..19: mol_type = other RNA
tgggactcgcttcccagtc

SEQ ID NO: 4547 - RNA, 19 nt, synthetic construct
  source 1..19: mol_type = other RNA
gggactcgcttcccagtcg

SEQ ID NO: 4548 - RNA, 19 nt, synthetic construct
  source 1..19: mol_type = other RNA
ggactcgcttcccagtcga

SEQ ID NO: 4549 - RNA, 19 nt, synthetic construct
  source 1..19: mol_type = other RNA
gactcgcttcccagtcgac

SEQ ID NO: 4550 - RNA, 19 nt, synthetic construct
  source 1..19: mol_type = other RNA
actcgcttcccagtcgaca

SEQ ID NO: 4551 - RNA, 19 nt, synthetic construct
  source 1..19: mol_type = other RNA
ctcgcttcccagtcgacac

SEQ ID NO: 4552 - RNA, 19 nt, synthetic construct
  source 1..19: mol_type = other RNA
tcgcttcccagtcgacact

SEQ ID NO: 4553 - RNA, 19 nt, synthetic construct
  source 1..19: mol_type = other RNA
cgcttcccagtcgacactc

SEQ ID NO: 4554 - RNA, 19 nt, synthetic construct
  source 1..19: mol_type = other RNA
gcttcccagtcgacactct

SEQ ID NO: 4555 - RNA, 19 nt, synthetic construct
  source 1..19: mol_type = other RNA
cttcccagtcgacactctg

SEQ ID NO: 4556 - RNA, 19 nt, synthetic construct
  source 1..19: mol_type = other RNA
ttcccagtcgacactctgc

SEQ ID NO: 4557 - RNA, 19 nt, synthetic construct
  source 1..19: mol_type = other RNA
tcccagtcgacactctgcc

SEQ ID NO: 4558 - RNA, 19 nt, synthetic construct
  source 1..19: mol_type = other RNA
cccagtcgacactctgccc

SEQ ID NO: 4559 - RNA, 19 nt, synthetic construct
  source 1..19: mol_type = other RNA
ccagtcgacactctgccct

SEQ ID NO: 4560 - RNA, 19 nt, synthetic construct
  source 1..19: mol_type = other RNA
cagtcgacactctgccctg

SEQ ID NO: 4561 - RNA, 19 nt, synthetic construct
  source 1..19: mol_type = other RNA
agtcgacactctgccctgc

SEQ ID NO: 4562 - RNA, 19 nt, synthetic construct
  source 1..19: mol_type = other RNA
gtcgacactctgccctgcc

SEQ ID NO: 4563 - RNA, 19 nt, synthetic construct
  source 1..19: mol_type = other RNA
tcgacactctgccctgcct

SEQ ID NO: 4564 - RNA, 19 nt, synthetic construct
  source 1..19: mol_type = other RNA
cgacactctgccctgcctg

SEQ ID NO: 4565 - RNA, 19 nt, synthetic construct
  source 1..19: mol_type = other RNA
gacactctgccctgcctgt

SEQ ID NO: 4566 - RNA, 19 nt, synthetic construct
  source 1..19: mol_type = other RNA
acactctgccctgcctgtc

SEQ ID NO: 4567 - RNA, 19 nt, synthetic construct
  source 1..19: mol_type = other RNA
cactctgccctgcctgtca

SEQ ID NO: 4568 - RNA, 19 nt, synthetic construct
  source 1..19: mol_type = other RNA
actctgccctgcctgtcat

SEQ ID NO: 4569 - RNA, 19 nt, synthetic construct
  source 1..19: mol_type = other RNA
ctctgccctgcctgtcatt

SEQ ID NO: 4570 - RNA, 19 nt, synthetic construct
  source 1..19: mol_type = other RNA
tctgccctgcctgtcattg

SEQ ID NO: 4571 - RNA, 19 nt, synthetic construct
  source 1..19: mol_type = other RNA
ctgccctgcctgtcattgc

SEQ ID NO: 4572 - RNA, 19 nt, synthetic construct
  source 1..19: mol_type = other RNA
tgccctgcctgtcattgct

SEQ ID NO: 4573 - RNA, 19 nt, synthetic construct
  source 1..19: mol_type = other RNA
gccctgcctgtcattgctg

SEQ ID NO: 4574 - RNA, 19 nt, synthetic construct
  source 1..19: mol_type = other RNA
ccctgcctgtcattgctgc

SEQ ID NO: 4575 - RNA, 19 nt, synthetic construct
  source 1..19: mol_type = other RNA
cctgcctgtcattgctgca

SEQ ID NO: 4576 - RNA, 19 nt, synthetic construct
  source 1..19: mol_type = other RNA
ctgcctgtcattgctgcaa

SEQ ID NO: 4577 - RNA, 19 nt, synthetic construct
  source 1..19: mol_type = other RNA
tgcctgtcattgctgcaaa

SEQ ID NO: 4578 - RNA, 19 nt, synthetic construct
  source 1..19: mol_type = other RNA
gcctgtcattgctgcaaag

SEQ ID NO: 4579 - RNA, 19 nt, synthetic construct
  source 1..19: mol_type = other RNA
cctgtcattgctgcaaaga

SEQ ID NO: 4580 - RNA, 19 nt, synthetic construct
  source 1..19: mol_type = other RNA
ctgtcattgctgcaaagag

SEQ ID NO: 4581 - RNA, 19 nt, synthetic construct
  source 1..19: mol_type = other RNA
tgtcattgctgcaaagagc

SEQ ID NO: 4582 - RNA, 19 nt, synthetic construct
  source 1..19: mol_type = other RNA
gtcattgctgcaaagagct

SEQ ID NO: 4583 - RNA, 19 nt, synthetic construct
  source 1..19: mol_type = other RNA
tcattgctgcaaagagctg

SEQ ID NO: 4584 - RNA, 19 nt, synthetic construct
  source 1..19: mol_type = other RNA
cattgctgcaaagagctgc

SEQ ID NO: 4585 - RNA, 19 nt, synthetic construct
  source 1..19: mol_type = other RNA
attgctgcaaagagctgct

SEQ ID NO: 4586 - RNA, 19 nt, synthetic construct
  source 1..19: mol_type = other RNA
ttgctgcaaagagctgctg

SEQ ID NO: 4587 - RNA, 19 nt, synthetic construct
  source 1..19: mol_type = other RNA
tgctgcaaagagctgctgc

SEQ ID NO: 4588 - RNA, 19 nt, synthetic construct
  source 1..19: mol_type = other RNA
gctgcaaagagctgctgct

SEQ ID NO: 4589 - RNA, 19 nt, synthetic construct
  source 1..19: mol_type = other RNA
ctgcaaagagctgctgctt

SEQ ID NO: 4590 - RNA, 19 nt, synthetic construct
  source 1..19: mol_type = other RNA
tgcaaagagctgctgcttt

SEQ ID NO: 4591 - RNA, 19 nt, synthetic construct
  source 1..19: mol_type = other RNA
gcaaagagctgctgctttg

SEQ ID NO: 4592 - RNA, 19 nt, synthetic construct
  source 1..19: mol_type = other RNA
caaagagctgctgctttgc

SEQ ID NO: 4593 - RNA, 19 nt, synthetic construct
  source 1..19: mol_type = other RNA
aaagagctgctgctttgcc

SEQ ID NO: 4594 - RNA, 19 nt, synthetic construct
  source 1..19: mol_type = other RNA
aagagctgctgctttgcca

SEQ ID NO: 4595 - RNA, 19 nt, synthetic construct
  source 1..19: mol_type = other RNA
agagctgctgctttgccaa

SEQ ID NO: 4596 - RNA, 19 nt, synthetic construct
  source 1..19: mol_type = other RNA
gagctgctgctttgccaac

SEQ ID NO: 4597 - RNA, 19 nt, synthetic construct
  source 1..19: mol_type = other RNA
agctgctgctttgccaacc

SEQ ID NO: 4598 - RNA, 19 nt, synthetic construct
  source 1..19: mol_type = other RNA
gctgctgctttgccaacct

SEQ ID NO: 4599 - RNA, 19 nt, synthetic construct
  source 1..19: mol_type = other RNA
ctgctgctttgccaaccta

SEQ ID NO: 4600 - RNA, 19 nt, synthetic construct
  source 1..19: mol_type = other RNA
tgctgctttgccaacctaa

SEQ ID NO: 4601 - RNA, 19 nt, synthetic construct
  source 1..19: mol_type = other RNA
gctgctttgccaacctaag

SEQ ID NO: 4602 - RNA, 19 nt, synthetic construct
  source 1..19: mol_type = other RNA
ctgctttgccaacctaagc

SEQ ID NO: 4603 - RNA, 19 nt, synthetic construct
  source 1..19: mol_type = other RNA
tgctttgccaacctaagca

SEQ ID NO: 4604 - RNA, 19 nt, synthetic construct
  source 1..19: mol_type = other RNA
gctttgccaacctaagcaa

SEQ ID NO: 4605 - RNA, 19 nt, synthetic construct
  source 1..19: mol_type = other RNA
ctttgccaacctaagcaaa

SEQ ID NO: 4606 - RNA, 19 nt, synthetic construct
  source 1..19: mol_type = other RNA
tttgccaacctaagcaaag

SEQ ID NO: 4607 - RNA, 19 nt, synthetic construct
  source 1..19: mol_type = other RNA
ttgccaacctaagcaaaga

SEQ ID NO: 4608 - RNA, 19 nt, synthetic construct
  source 1..19: mol_type = other RNA
tgccaacctaagcaaagaa

SEQ ID NO: 4609 - RNA, 19 nt, synthetic construct
  source 1..19: mol_type = other RNA
gccaacctaagcaaagaaa

SEQ ID NO: 4610 - RNA, 19 nt, synthetic construct
  source 1..19: mol_type = other RNA
ccaacctaagcaaagaaaa

SEQ ID NO: 4611 - RNA, 19 nt, synthetic construct
  source 1..19: mol_type = other RNA
caacctaagcaaagaaaat

SEQ ID NO: 4612 - RNA, 19 nt, synthetic construct
  source 1..19: mol_type = other RNA
aacctaagcaaagaaaata

SEQ ID NO: 4613 - RNA, 19 nt, synthetic construct
  source 1..19: mol_type = other RNA
acctaagcaaagaaaatac

SEQ ID NO: 4614 - RNA, 19 nt, synthetic construct
  source 1..19: mol_type = other RNA
cctaagcaaagaaaatacg

SEQ ID NO: 4615 - RNA, 19 nt, synthetic construct
  source 1..19: mol_type = other RNA
ctaagcaaagaaaatacgg

SEQ ID NO: 4616 - RNA, 19 nt, synthetic construct
  source 1..19: mol_type = other RNA
taagcaaagaaaatacggc

SEQ ID NO: 4617 - RNA, 19 nt, synthetic construct
  source 1..19: mol_type = other RNA
aagcaaagaaaatacggct

SEQ ID NO: 4618 - RNA, 19 nt, synthetic construct
  source 1..19: mol_type = other RNA
agcaaagaaaatacggctt

SEQ ID NO: 4619 - RNA, 19 nt, synthetic construct
  source 1..19: mol_type = other RNA
gcaaagaaaatacggcttc

SEQ ID NO: 4620 - RNA, 19 nt, synthetic construct
  source 1..19: mol_type = other RNA
caaagaaaatacggcttct

SEQ ID NO: 4621 - RNA, 19 nt, synthetic construct
  source 1..19: mol_type = other RNA
aaagaaaatacggcttctc

SEQ ID NO: 4622 - RNA, 19 nt, synthetic construct
  source 1..19: mol_type = other RNA
aagaaaatacggcttctct

SEQ ID NO: 4623 - RNA, 19 nt, synthetic construct
  source 1..19: mol_type = other RNA
agaaaatacggcttctctt

SEQ ID NO: 4624 - RNA, 19 nt, synthetic construct
  source 1..19: mol_type = other RNA
gaaaatacggcttctcttg

SEQ ID NO: 4625 - RNA, 19 nt, synthetic construct
  source 1..19: mol_type = other RNA
aaaatacggcttctcttgc

SEQ ID NO: 4626 - RNA, 19 nt, synthetic construct
  source 1..19: mol_type = other RNA
aaatacggcttctcttgca

SEQ ID NO: 4627 - RNA, 19 nt, synthetic construct
  source 1..19: mol_type = other RNA
aatacggcttctcttgcat

SEQ ID NO: 4628 - RNA, 19 nt, synthetic construct
  source 1..19: mol_type = other RNA
atacggcttctcttgcatt

SEQ ID NO: 4629 - RNA, 19 nt, synthetic construct
  source 1..19: mol_type = other RNA
tacggcttctcttgcatta

SEQ ID NO: 4630 - RNA, 19 nt, synthetic construct
  source 1..19: mol_type = other RNA
acggcttctcttgcattat

SEQ ID NO: 4631 - RNA, 19 nt, synthetic construct
  source 1..19: mol_type = other RNA
cggcttctcttgcattatt

SEQ ID NO: 4632 - RNA, 19 nt, synthetic construct
  source 1..19: mol_type = other RNA
ggcttctcttgcattattt

SEQ ID NO: 4633 - RNA, 19 nt, synthetic construct
  source 1..19: mol_type = other RNA
gcttctcttgcattatttt

SEQ ID NO: 4634 - RNA, 19 nt, synthetic construct
  source 1..19: mol_type = other RNA
cttctcttgcattattttc

SEQ ID NO: 4635 - RNA, 19 nt, synthetic construct
  source 1..19: mol_type = other RNA
ttctcttgcattattttcc

SEQ ID NO: 4636 - RNA, 19 nt, synthetic construct
  source 1..19: mol_type = other RNA
tctcttgcattattttccc

SEQ ID NO: 4637 - RNA, 19 nt, synthetic construct
  source 1..19: mol_type = other RNA
ctcttgcattattttccct

SEQ ID NO: 4638 - RNA, 19 nt, synthetic construct
  source 1..19: mol_type = other RNA
tcttgcattattttccctt

SEQ ID NO: 4639 - RNA, 19 nt, synthetic construct
  source 1..19: mol_type = other RNA
cttgcattattttcccttt

SEQ ID NO: 4640 - RNA, 19 nt, synthetic construct
  source 1..19: mol_type = other RNA
ttgcattattttccctttt

SEQ ID NO: 4641 - RNA, 19 nt, synthetic construct
  source 1..19: mol_type = other RNA
tgcattattttcccttttg

SEQ ID NO: 4642 - RNA, 19 nt, synthetic construct
  source 1..19: mol_type = other RNA
gcattattttcccttttgg

SEQ ID NO: 4643 - RNA, 19 nt, synthetic construct
  source 1..19: mol_type = other RNA
cattattttcccttttggt

SEQ ID NO: 4644 - RNA, 19 nt, synthetic construct
  source 1..19: mol_type = other RNA
attattttcccttttggtt

SEQ ID NO: 4645 - RNA, 19 nt, synthetic construct
  source 1..19: mol_type = other RNA
ttattttcccttttggttg

SEQ ID NO: 4646 - RNA, 19 nt, synthetic construct
  source 1..19: mol_type = other RNA
tattttcccttttggttgg

SEQ ID NO: 4647 - RNA, 19 nt, synthetic construct
  source 1..19: mol_type = other RNA
attttcccttttggttggt

SEQ ID NO: 4648 - RNA, 19 nt, synthetic construct
  source 1..19: mol_type = other RNA
ttttcccttttggttggtt

SEQ ID NO: 4649 - RNA, 19 nt, synthetic construct
  source 1..19: mol_type = other RNA
tttcccttttggttggttt

SEQ ID NO: 4650 - RNA, 19 nt, synthetic construct
  source 1..19: mol_type = other RNA
ttcccttttggttggtttg

SEQ ID NO: 4651 - RNA, 19 nt, synthetic construct
  source 1..19: mol_type = other RNA
tcccttttggttggtttgt

SEQ ID NO: 4652 - RNA, 19 nt, synthetic construct
  source 1..19: mol_type = other RNA
cccttttggttggtttgtt

SEQ ID NO: 4653 - RNA, 19 nt, synthetic construct
  source 1..19: mol_type = other RNA
ccttttggttggtttgttt

SEQ ID NO: 4654 - RNA, 19 nt, synthetic construct
  source 1..19: mol_type = other RNA
cttttggttggtttgtttt

SEQ ID NO: 4655 - RNA, 19 nt, synthetic construct
  source 1..19: mol_type = other RNA
ttttggttggtttgttttc

SEQ ID NO: 4656 - RNA, 19 nt, synthetic construct
  source 1..19: mol_type = other RNA
tttggttggtttgttttct

SEQ ID NO: 4657 - RNA, 19 nt, synthetic construct
  source 1..19: mol_type = other RNA
ttggttggtttgttttcta

SEQ ID NO: 4658 - RNA, 19 nt, synthetic construct
  source 1..19: mol_type = other RNA
tggttggtttgttttctag

SEQ ID NO: 4659 - RNA, 19 nt, synthetic construct
  source 1..19: mol_type = other RNA
ggttggtttgttttctaga

SEQ ID NO: 4660 - RNA, 19 nt, synthetic construct
  source 1..19: mol_type = other RNA
gttggtttgttttctagaa

SEQ ID NO: 4661 - RNA, 19 nt, synthetic construct
  source 1..19: mol_type = other RNA
ttggtttgttttctagaag

SEQ ID NO: 4662 - RNA, 19 nt, synthetic construct
  source 1..19: mol_type = other RNA
tggtttgttttctagaagt

SEQ ID NO: 4663 - RNA, 19 nt, synthetic construct
  source 1..19: mol_type = other RNA
ggtttgttttctagaagta

SEQ ID NO: 4664 - RNA, 19 nt, synthetic construct
  source 1..19: mol_type = other RNA
gtttgttttctagaagtac

SEQ ID NO: 4665 - RNA, 19 nt, synthetic construct
  source 1..19: mol_type = other RNA
tttgttttctagaagtacg

SEQ ID NO: 4666 - RNA, 19 nt, synthetic construct
  source 1..19: mol_type = other RNA
ttgttttctagaagtacgt

SEQ ID NO: 4667 - RNA, 19 nt, synthetic construct
  source 1..19: mol_type = other RNA
tgttttctagaagtacgtt

SEQ ID NO: 4668 - RNA, 19 nt, synthetic construct
  source 1..19: mol_type = other RNA
gttttctagaagtacgttc

SEQ ID NO: 4669 - RNA, 19 nt, synthetic construct
  source 1..19: mol_type = other RNA
ttttctagaagtacgttca

SEQ ID NO: 4670 - RNA, 19 nt, synthetic construct
  source 1..19: mol_type = other RNA
tttctagaagtacgttcag

SEQ ID NO: 4671 - RNA, 19 nt, synthetic construct
  source 1..19: mol_type = other RNA
ttctagaagtacgttcaga

SEQ ID NO: 4672 - RNA, 19 nt, synthetic construct
  source 1..19: mol_type = other RNA
tctagaagtacgttcagat

SEQ ID NO: 4673 - RNA, 19 nt, synthetic construct
  source 1..19: mol_type = other RNA
ctagaagtacgttcagatg

SEQ ID NO: 4674 - RNA, 19 nt, synthetic construct
  source 1..19: mol_type = other RNA
tagaagtacgttcagatgc

SEQ ID NO: 4675 - RNA, 19 nt, synthetic construct
  source 1..19: mol_type = other RNA
agaagtacgttcagatgct

SEQ ID NO: 4676 - RNA, 19 nt, synthetic construct
  source 1..19: mol_type = other RNA
gaagtacgttcagatgctt

SEQ ID NO: 4677 - RNA, 19 nt, synthetic construct
  source 1..19: mol_type = other RNA
aagtacgttcagatgcttt

SEQ ID NO: 4678 - RNA, 19 nt, synthetic construct
  source 1..19: mol_type = other RNA
agtacgttcagatgctttg

SEQ ID NO: 4679 - RNA, 19 nt, synthetic construct
  source 1..19: mol_type = other RNA
gtacgttcagatgctttgg

SEQ ID NO: 4680 - RNA, 19 nt, synthetic construct
  source 1..19: mol_type = other RNA
tacgttcagatgctttggg

SEQ ID NO: 4681 - RNA, 19 nt, synthetic construct
  source 1..19: mol_type = other RNA
acgttcagatgctttgggg

SEQ ID NO: 4682 - RNA, 19 nt, synthetic construct
  source 1..19: mol_type = other RNA
cgttcagatgctttgggga

SEQ ID NO: 4683 - RNA, 19 nt, synthetic construct
  source 1..19: mol_type = other RNA
gttcagatgctttggggaa

SEQ ID NO: 4684 - RNA, 19 nt, synthetic construct
  source 1..19: mol_type = other RNA
ttcagatgctttggggaat

SEQ ID NO: 4685 - RNA, 19 nt, synthetic construct
  source 1..19: mol_type = other RNA
tcagatgctttggggaatg

SEQ ID NO: 4686 - RNA, 19 nt, synthetic construct
  source 1..19: mol_type = other RNA
cagatgctttggggaatgc

SEQ ID NO: 4687 - RNA, 19 nt, synthetic construct
  source 1..19: mol_type = other RNA
agatgctttggggaatgca

SEQ ID NO: 4688 - RNA, 19 nt, synthetic construct
  source 1..19: mol_type = other RNA
gatgctttggggaatgcaa

SEQ ID NO: 4689 - RNA, 19 nt, synthetic construct
  source 1..19: mol_type = other RNA
atgctttggggaatgcaat

SEQ ID NO: 4690 - RNA, 19 nt, synthetic construct
  source 1..19: mol_type = other RNA
tgctttggggaatgcaatg

SEQ ID NO: 4691 - RNA, 19 nt, synthetic construct
  source 1..19: mol_type = other RNA
gctttggggaatgcaatgt

SEQ ID NO: 4692 - RNA, 19 nt, synthetic construct
  source 1..19: mol_type = other RNA
ctttggggaatgcaatgta

SEQ ID NO: 4693 - RNA, 19 nt, synthetic construct
  source 1..19: mol_type = other RNA
tttggggaatgcaatgtat

SEQ ID NO: 4694 - RNA, 19 nt, synthetic construct
  source 1..19: mol_type = other RNA
ttggggaatgcaatgtatg

SEQ ID NO: 4695 - RNA, 19 nt, synthetic construct
  source 1..19: mol_type = other RNA
tggggaatgcaatgtatga

SEQ ID NO: 4696 - RNA, 19 nt, synthetic construct
  source 1..19: mol_type = other RNA
ggggaatgcaatgtatgat

SEQ ID NO: 4697 - RNA, 19 nt, synthetic construct
  source 1..19: mol_type = other RNA
gggaatgcaatgtatgatt

SEQ ID NO: 4698 - RNA, 19 nt, synthetic construct
  source 1..19: mol_type = other RNA
ggaatgcaatgtatgattt

SEQ ID NO: 4699 - RNA, 19 nt, synthetic construct
  source 1..19: mol_type = other RNA
gaatgcaatgtatgatttg

SEQ ID NO: 4700 - RNA, 19 nt, synthetic construct
  source 1..19: mol_type = other RNA
aatgcaatgtatgatttgc

SEQ ID NO: 4701 - RNA, 19 nt, synthetic construct
  source 1..19: mol_type = other RNA
atgcaatgtatgatttgct

SEQ ID NO: 4702 - RNA, 19 nt, synthetic construct
  source 1..19: mol_type = other RNA
tgcaatgtatgatttgcta

SEQ ID NO: 4703 - RNA, 19 nt, synthetic construct
  source 1..19: mol_type = other RNA
gcaatgtatgatttgctag

SEQ ID NO: 4704 - RNA, 19 nt, synthetic construct
  source 1..19: mol_type = other RNA
caatgtatgatttgctagc

SEQ ID NO: 4705 - RNA, 19 nt, synthetic construct
  source 1..19: mol_type = other RNA
aatgtatgatttgctagct

SEQ ID NO: 4706 - RNA, 19 nt, synthetic construct
  source 1..19: mol_type = other RNA
atgtatgatttgctagctc

SEQ ID NO: 4707 - RNA, 19 nt, synthetic construct
  source 1..19: mol_type = other RNA
tgtatgatttgctagctct

SEQ ID NO: 4708 - RNA, 19 nt, synthetic construct
  source 1..19: mol_type = other RNA
gtatgatttgctagctctc

SEQ ID NO: 4709 - RNA, 19 nt, synthetic construct
  source 1..19: mol_type = other RNA
tatgatttgctagctctct

SEQ ID NO: 4710 - RNA, 19 nt, synthetic construct
  source 1..19: mol_type = other RNA
atgatttgctagctctctc

SEQ ID NO: 4711 - RNA, 19 nt, synthetic construct
  source 1..19: mol_type = other RNA
tgatttgctagctctctca

SEQ ID NO: 4712 - RNA, 19 nt, synthetic construct
  source 1..19: mol_type = other RNA
gatttgctagctctctcac

SEQ ID NO: 4713 - RNA, 19 nt, synthetic construct
  source 1..19: mol_type = other RNA
atttgctagctctctcacc

SEQ ID NO: 4714 - RNA, 19 nt, synthetic construct
  source 1..19: mol_type = other RNA
tttgctagctctctcacca

SEQ ID NO: 4715 - RNA, 19 nt, synthetic construct
  source 1..19: mol_type = other RNA
ttgctagctctctcaccac

SEQ ID NO: 4716 - RNA, 19 nt, synthetic construct
  source 1..19: mol_type = other RNA
tgctagctctctcaccact

SEQ ID NO: 4717 - RNA, 19 nt, synthetic construct
  source 1..19: mol_type = other RNA
gctagctctctcaccactt

SEQ ID NO: 4718 - RNA, 19 nt, synthetic construct
  source 1..19: mol_type = other RNA
ctagctctctcaccactta

SEQ ID NO: 4719 - RNA, 19 nt, synthetic construct
  source 1..19: mol_type = other RNA
tagctctctcaccacttaa

SEQ ID NO: 4720 - RNA, 19 nt, synthetic construct
  source 1..19: mol_type = other RNA
agctctctcaccacttaac

SEQ ID NO: 4721 - RNA, 19 nt, synthetic construct
  source 1..19: mol_type = other RNA
gctctctcaccacttaact

SEQ ID NO: 4722 - RNA, 19 nt, synthetic construct
  source 1..19: mol_type = other RNA
ctctctcaccacttaactc

SEQ ID NO: 4723 - RNA, 19 nt, synthetic construct
  source 1..19: mol_type = other RNA
tctctcaccacttaactca

SEQ ID NO: 4724 - RNA, 19 nt, synthetic construct
  source 1..19: mol_type = other RNA
ctctcaccacttaactcac

SEQ ID NO: 4725 - RNA, 19 nt, synthetic construct
  source 1..19: mol_type = other RNA
tctcaccacttaactcact

SEQ ID NO: 4726 - RNA, 19 nt, synthetic construct
  source 1..19: mol_type = other RNA
ctcaccacttaactcactg

SEQ ID NO: 4727 - RNA, 19 nt, synthetic construct
  source 1..19: mol_type = other RNA
tcaccacttaactcactgt

SEQ ID NO: 4728 - RNA, 19 nt, synthetic construct
  source 1..19: mol_type = other RNA
caccacttaactcactgtg

SEQ ID NO: 4729 - RNA, 19 nt, synthetic construct
  source 1..19: mol_type = other RNA
accacttaactcactgtga

SEQ ID NO: 4730 - RNA, 19 nt, synthetic construct
  source 1..19: mol_type = other RNA
ccacttaactcactgtgag

SEQ ID NO: 4731 - RNA, 19 nt, synthetic construct
  source 1..19: mol_type = other RNA
cacttaactcactgtgagg

SEQ ID NO: 4732 - RNA, 19 nt, synthetic construct
  source 1..19: mol_type = other RNA
acttaactcactgtgagga

SEQ ID NO: 4733 - RNA, 19 nt, synthetic construct
  source 1..19: mol_type = other RNA
cttaactcactgtgaggat

SEQ ID NO: 4734 - RNA, 19 nt, synthetic construct
  source 1..19: mol_type = other RNA
ttaactcactgtgaggata

SEQ ID NO: 4735 - RNA, 19 nt, synthetic construct
  source 1..19: mol_type = other RNA
taactcactgtgaggataa

SEQ ID NO: 4736 - RNA, 19 nt, synthetic construct
  source 1..19: mol_type = other RNA
aactcactgtgaggataaa

SEQ ID NO: 4737 - RNA, 19 nt, synthetic construct
  source 1..19: mol_type = other RNA
actcactgtgaggataaat

SEQ ID NO: 4738 - RNA, 19 nt, synthetic construct
  source 1..19: mol_type = other RNA
ctcactgtgaggataaata

SEQ ID NO: 4739 - RNA, 19 nt, synthetic construct
  source 1..19: mol_type = other RNA
tcactgtgaggataaatat

SEQ ID NO: 4740 - RNA, 19 nt, synthetic construct
  source 1..19: mol_type = other RNA
cactgtgaggataaatatg

SEQ ID NO: 4741 - RNA, 19 nt, synthetic construct
  source 1..19: mol_type = other RNA
actgtgaggataaatatgc

SEQ ID NO: 4742 - RNA, 19 nt, synthetic construct
  source 1..19: mol_type = other RNA
ctgtgaggataaatatgca

SEQ ID NO: 4743 - RNA, 19 nt, synthetic construct
  source 1..19: mol_type = other RNA
tgtgaggataaatatgcat

SEQ ID NO: 4744 - RNA, 19 nt, synthetic construct
  source 1..19: mol_type = other RNA
gtgaggataaatatgcatg

SEQ ID NO: 4745 - RNA, 19 nt, synthetic construct
  source 1..19: mol_type = other RNA
tgaggataaatatgcatgc

SEQ ID NO: 4746 - RNA, 19 nt, synthetic construct
  source 1..19: mol_type = other RNA
gaggataaatatgcatgct

SEQ ID NO: 4747 - RNA, 19 nt, synthetic construct
  source 1..19: mol_type = other RNA
aggataaatatgcatgctt

SEQ ID NO: 4748 - RNA, 19 nt, synthetic construct
  source 1..19: mol_type = other RNA
ggataaatatgcatgcttt

SEQ ID NO: 4749 - RNA, 19 nt, synthetic construct
  source 1..19: mol_type = other RNA
gataaatatgcatgctttt

SEQ ID NO: 4750 - RNA, 19 nt, synthetic construct
  source 1..19: mol_type = other RNA
ataaatatgcatgcttttt

SEQ ID NO: 4751 - RNA, 19 nt, synthetic construct
  source 1..19: mol_type = other RNA
taaatatgcatgctttttg

SEQ ID NO: 4752 - RNA, 19 nt, synthetic construct
  source 1..19: mol_type = other RNA
aaatatgcatgctttttgt

SEQ ID NO: 4753 - RNA, 19 nt, synthetic construct
  source 1..19: mol_type = other RNA
aatatgcatgctttttgta

SEQ ID NO: 4754 - RNA, 19 nt, synthetic construct
  source 1..19: mol_type = other RNA
atatgcatgctttttgtaa

SEQ ID NO: 4755 - RNA, 19 nt, synthetic construct
  source 1..19: mol_type = other RNA
tatgcatgctttttgtaat

SEQ ID NO: 4756 - RNA, 19 nt, synthetic construct
  source 1..19: mol_type = other RNA
atgcatgctttttgtaatt

SEQ ID NO: 4757 - RNA, 19 nt, synthetic construct
  source 1..19: mol_type = other RNA
tgcatgctttttgtaatta

SEQ ID NO: 4758 - RNA, 19 nt, synthetic construct
  source 1..19: mol_type = other RNA
gcatgctttttgtaattaa

SEQ ID NO: 4759 - RNA, 19 nt, synthetic construct
  source 1..19: mol_type = other RNA
catgctttttgtaattaac

SEQ ID NO: 4760 - RNA, 19 nt, synthetic construct
  source 1..19: mol_type = other RNA
atgctttttgtaattaact

SEQ ID NO: 4761 - RNA, 19 nt, synthetic construct
  source 1..19: mol_type = other RNA
tgctttttgtaattaactg

SEQ ID NO: 4762 - RNA, 19 nt, synthetic construct
  source 1..19: mol_type = other RNA
gctttttgtaattaactgg

SEQ ID NO: 4763 - RNA, 19 nt, synthetic construct
  source 1..19: mol_type = other RNA
ctttttgtaattaactggt

SEQ ID NO: 4764 - RNA, 19 nt, synthetic construct
  source 1..19: mol_type = other RNA
tttttgtaattaactggtg

SEQ ID NO: 4765 - RNA, 19 nt, synthetic construct
  source 1..19: mol_type = other RNA
ttttgtaattaactggtgc

SEQ ID NO: 4766 - RNA, 19 nt, synthetic construct
  source 1..19: mol_type = other RNA
tttgtaattaactggtgct

SEQ ID NO: 4767 - RNA, 19 nt, synthetic construct
  source 1..19: mol_type = other RNA
ttgtaattaactggtgctt

SEQ ID NO: 4768 - RNA, 19 nt, synthetic construct
  source 1..19: mol_type = other RNA
tgtaattaactggtgcttt

SEQ ID NO: 4769 - RNA, 19 nt, synthetic construct
  source 1..19: mol_type = other RNA
gtaattaactggtgctttg

SEQ ID NO: 4770 - RNA, 19 nt, synthetic construct
  source 1..19: mol_type = other RNA
taattaactggtgctttga

SEQ ID NO: 4771 - RNA, 19 nt, synthetic construct
  source 1..19: mol_type = other RNA
aattaactggtgctttgaa

SEQ ID NO: 4772 - RNA, 19 nt, synthetic construct
  source 1..19: mol_type = other RNA
attaactggtgctttgaaa

SEQ ID NO: 4773 - RNA, 19 nt, synthetic construct
  source 1..19: mol_type = other RNA
ttaactggtgctttgaaaa

SEQ ID NO: 4774 - RNA, 19 nt, synthetic construct
  source 1..19: mol_type = other RNA
taactggtgctttgaaaat

SEQ ID NO: 4775 - RNA, 19 nt, synthetic construct
  source 1..19: mol_type = other RNA
aactggtgctttgaaaatc

SEQ ID NO: 4776 - RNA, 19 nt, synthetic construct
  source 1..19: mol_type = other RNA
actggtgctttgaaaatct

SEQ ID NO: 4777 - RNA, 19 nt, synthetic construct
  source 1..19: mol_type = other RNA
ctggtgctttgaaaatctt

SEQ ID NO: 4778 - RNA, 19 nt, synthetic construct
  source 1..19: mol_type = other RNA
tggtgctttgaaaatcttt

SEQ ID NO: 4779 - RNA, 19 nt, synthetic construct
  source 1..19: mol_type = other RNA
ggtgctttgaaaatctttt

SEQ ID NO: 4780 - RNA, 19 nt, synthetic construct
  source 1..19: mol_type = other RNA
gtgctttgaaaatcttttt

SEQ ID NO: 4781 - RNA, 19 nt, synthetic construct
  source 1..19: mol_type = other RNA
tgctttgaaaatctttttt

SEQ ID NO: 4782 - RNA, 19 nt, synthetic construct
  source 1..19: mol_type = other RNA
gctttgaaaatctttttta

SEQ ID NO: 4783 - RNA, 19 nt, synthetic construct
  source 1..19: mol_type = other RNA
ctttgaaaatcttttttaa

SEQ ID NO: 4784 - RNA, 19 nt, synthetic construct
  source 1..19: mol_type = other RNA
tttgaaaatcttttttaag

SEQ ID NO: 4785 - RNA, 19 nt, synthetic construct
  source 1..19: mol_type = other RNA
ttgaaaatcttttttaagg

SEQ ID NO: 4786 - RNA, 19 nt, synthetic construct
  source 1..19: mol_type = other RNA
tgaaaatcttttttaaggg

SEQ ID NO: 4787 - RNA, 19 nt, synthetic construct
  source 1..19: mol_type = other RNA
gaaaatcttttttaaggga

SEQ ID NO: 4788 - RNA, 19 nt, synthetic construct
  source 1..19: mol_type = other RNA
aaaatcttttttaagggag

SEQ ID NO: 4789 - RNA, 19 nt, synthetic construct
  source 1..19: mol_type = other RNA
aaatcttttttaagggaga

SEQ ID NO: 4790 - RNA, 19 nt, synthetic construct
  source 1..19: mol_type = other RNA
aatcttttttaagggagaa

SEQ ID NO: 4791 - RNA, 19 nt, synthetic construct
  source 1..19: mol_type = other RNA
atcttttttaagggagaaa

SEQ ID NO: 4792 - RNA, 19 nt, synthetic construct
  source 1..19: mol_type = other RNA
tcttttttaagggagaaaa

SEQ ID NO: 4793 - RNA, 19 nt, synthetic construct
  source 1..19: mol_type = other RNA
cttttttaagggagaaaaa

SEQ ID NO: 4794 - RNA, 19 nt, synthetic construct
  source 1..19: mol_type = other RNA
ttttttaagggagaaaaat

SEQ ID NO: 4795 - RNA, 19 nt, synthetic construct
  source 1..19: mol_type = other RNA
tttttaagggagaaaaatc

SEQ ID NO: 4796 - RNA, 19 nt, synthetic construct
  source 1..19: mol_type = other RNA
ttttaagggagaaaaatct

SEQ ID NO: 4797 - RNA, 19 nt, synthetic construct
  source 1..19: mol_type = other RNA
tttaagggagaaaaatctc

SEQ ID NO: 4798 - RNA, 19 nt, synthetic construct
  source 1..19: mol_type = other RNA
ttaagggagaaaaatctca

SEQ ID NO: 4799 - RNA, 19 nt, synthetic construct
  source 1..19: mol_type = other RNA
taagggagaaaaatctcaa

SEQ ID NO: 4800 - RNA, 19 nt, synthetic construct
  source 1..19: mol_type = other RNA
aagggagaaaaatctcaac

SEQ ID NO: 4801 - RNA, 19 nt, synthetic construct
  source 1..19: mol_type = other RNA
agggagaaaaatctcaacc

SEQ ID NO: 4802 - RNA, 19 nt, synthetic construct
  source 1..19: mol_type = other RNA
gggagaaaaatctcaacca

SEQ ID NO: 4803 - RNA, 19 nt, synthetic construct
  source 1..19: mol_type = other RNA
ggagaaaaatctcaaccaa

SEQ ID NO: 4804 - RNA, 19 nt, synthetic construct
  source 1..19: mol_type = other RNA
gagaaaaatctcaaccaaa

SEQ ID NO: 4805 - RNA, 19 nt, synthetic construct
  source 1..19: mol_type = other RNA
agaaaaatctcaaccaaag

SEQ ID NO: 4806 - RNA, 19 nt, synthetic construct
  source 1..19: mol_type = other RNA
gaaaaatctcaaccaaagt

SEQ ID NO: 4807 - RNA, 19 nt, synthetic construct
  source 1..19: mol_type = other RNA
aaaaatctcaaccaaagtt

SEQ ID NO: 4808 - RNA, 19 nt, synthetic construct
  source 1..19: mol_type = other RNA
aaaatctcaaccaaagtta

SEQ ID NO: 4809 - RNA, 19 nt, synthetic construct
  source 1..19: mol_type = other RNA
aaatctcaaccaaagttat

SEQ ID NO: 4810 - RNA, 19 nt, synthetic construct
  source 1..19: mol_type = other RNA
aatctcaaccaaagttatg

SEQ ID NO: 4811 - RNA, 19 nt, synthetic construct
  source 1..19: mol_type = other RNA
atctcaaccaaagttatgc

SEQ ID NO: 4812 - RNA, 19 nt, synthetic construct
  source 1..19: mol_type = other RNA
tctcaaccaaagttatgct

SEQ ID NO: 4813 - RNA, 19 nt, synthetic construct
  source 1..19: mol_type = other RNA
ctcaaccaaagttatgctc

SEQ ID NO: 4814 - RNA, 19 nt, synthetic construct
  source 1..19: mol_type = other RNA
tcaaccaaagttatgctca

SEQ ID NO: 4815 - RNA, 19 nt, synthetic construct
  source 1..19: mol_type = other RNA
caaccaaagttatgctcat

SEQ ID NO: 4816 - RNA, 19 nt, synthetic construct
  source 1..19: mol_type = other RNA
aaccaaagttatgctcatc

SEQ ID NO: 4817 - RNA, 19 nt, synthetic construct
  source 1..19: mol_type = other RNA
accaaagttatgctcatcc

SEQ ID NO: 4818 - RNA, 19 nt, synthetic construct
  source 1..19: mol_type = other RNA
ccaaagttatgctcatcca

SEQ ID NO: 4819 - RNA, 19 nt, synthetic construct
  source 1..19: mol_type = other RNA
caaagttatgctcatccag

SEQ ID NO: 4820 - RNA, 19 nt, synthetic construct
  source 1..19: mol_type = other RNA
aaagttatgctcatccaga

SEQ ID NO: 4821 - RNA, 19 nt, synthetic construct
  source 1..19: mol_type = other RNA
aagttatgctcatccagac

SEQ ID NO: 4822 - RNA, 19 nt, synthetic construct
  source 1..19: mol_type = other RNA
agttatgctcatccagaca

SEQ ID NO: 4823 - RNA, 19 nt, synthetic construct
  source 1..19: mol_type = other RNA
gttatgctcatccagacaa

SEQ ID NO: 4824 - RNA, 19 nt, synthetic construct
  source 1..19: mol_type = other RNA
ttatgctcatccagacaag

SEQ ID NO: 4825 - RNA, 19 nt, synthetic construct
  source 1..19: mol_type = other RNA
tatgctcatccagacaagc

SEQ ID NO: 4826 - RNA, 19 nt, synthetic construct
  source 1..19: mol_type = other RNA
atgctcatccagacaagct

SEQ ID NO: 4827 - RNA, 19 nt, synthetic construct
  source 1..19: mol_type = other RNA
tgctcatccagacaagctg

SEQ ID NO: 4828 - RNA, 19 nt, synthetic construct
  source 1..19: mol_type = other RNA
gctcatccagacaagctga

SEQ ID NO: 4829 - RNA, 19 nt, synthetic construct
  source 1..19: mol_type = other RNA
ctcatccagacaagctgac

SEQ ID NO: 4830 - RNA, 19 nt, synthetic construct
  source 1..19: mol_type = other RNA
tcatccagacaagctgacc

SEQ ID NO: 4831 - RNA, 19 nt, synthetic construct
  source 1..19: mol_type = other RNA
catccagacaagctgacct

SEQ ID NO: 4832 - RNA, 19 nt, synthetic construct
  source 1..19: mol_type = other RNA
atccagacaagctgacctt

SEQ ID NO: 4833 - RNA, 19 nt, synthetic construct
  source 1..19: mol_type = other RNA
tccagacaagctgaccttt

SEQ ID NO: 4834 - RNA, 19 nt, synthetic construct
  source 1..19: mol_type = other RNA
ccagacaagctgacctttg

SEQ ID NO: 4835 - RNA, 19 nt, synthetic construct
  source 1..19: mol_type = other RNA
cagacaagctgacctttga

SEQ ID NO: 4836 - RNA, 19 nt, synthetic construct
  source 1..19: mol_type = other RNA
agacaagctgacctttgag

SEQ ID NO: 4837 - RNA, 19 nt, synthetic construct
  source 1..19: mol_type = other RNA
gacaagctgacctttgagt

SEQ ID NO: 4838 - RNA, 19 nt, synthetic construct
  source 1..19: mol_type = other RNA
acaagctgacctttgagtt

SEQ ID NO: 4839 - RNA, 19 nt, synthetic construct
  source 1..19: mol_type = other RNA
caagctgacctttgagtta

SEQ ID NO: 4840 - RNA, 19 nt, synthetic construct
  source 1..19: mol_type = other RNA
aagctgacctttgagttaa

SEQ ID NO: 4841 - RNA, 19 nt, synthetic construct
  source 1..19: mol_type = other RNA
agctgacctttgagttaat

SEQ ID NO: 4842 - RNA, 19 nt, synthetic construct
  source 1..19: mol_type = other RNA
gctgacctttgagttaatt

SEQ ID NO: 4843 - RNA, 19 nt, synthetic construct
  source 1..19: mol_type = other RNA
ctgacctttgagttaattt

SEQ ID NO: 4844 - RNA, 19 nt, synthetic construct
  source 1..19: mol_type = other RNA
tgacctttgagttaatttc

SEQ ID NO: 4845 - RNA, 19 nt, synthetic construct
  source 1..19: mol_type = other RNA
gacctttgagttaatttca

SEQ ID NO: 4846 - RNA, 19 nt, synthetic construct
  source 1..19: mol_type = other RNA
acctttgagttaatttcag

SEQ ID NO: 4847 - RNA, 19 nt, synthetic construct
  source 1..19: mol_type = other RNA
cctttgagttaatttcagc

SEQ ID NO: 4848 - RNA, 19 nt, synthetic construct
  source 1..19: mol_type = other RNA
ctttgagttaatttcagca

SEQ ID NO: 4849 - RNA, 19 nt, synthetic construct
  source 1..19: mol_type = other RNA
tttgagttaatttcagcac

SEQ ID NO: 4850 - RNA, 19 nt, synthetic construct
  source 1..19: mol_type = other RNA
ttgagttaatttcagcaca

SEQ ID NO: 4851 - RNA, 19 nt, synthetic construct
  source 1..19: mol_type = other RNA
tgagttaatttcagcacaa

SEQ ID NO: 4852 - RNA, 19 nt, synthetic construct
  source 1..19: mol_type = other RNA
gagttaatttcagcacaac

SEQ ID NO: 4853 - RNA, 19 nt, synthetic construct
  source 1..19: mol_type = other RNA
agttaatttcagcacaact

SEQ ID NO: 4854 - RNA, 19 nt, synthetic construct
  source 1..19: mol_type = other RNA
gttaatttcagcacaactc

SEQ ID NO: 4855 - RNA, 19 nt, synthetic construct
  source 1..19: mol_type = other RNA
ttaatttcagcacaactca

SEQ ID NO: 4856 - RNA, 19 nt, synthetic construct
  source 1..19: mol_type = other RNA
taatttcagcacaactcat

SEQ ID NO: 4857 - RNA, 19 nt, synthetic construct
  source 1..19: mol_type = other RNA
aatttcagcacaactcatt

SEQ ID NO: 4858 - RNA, 19 nt, synthetic construct
  source 1..19: mol_type = other RNA
atttcagcacaactcattc

SEQ ID NO: 4859 - RNA, 19 nt, synthetic construct
  source 1..19: mol_type = other RNA
tttcagcacaactcattct

SEQ ID NO: 4860 - RNA, 19 nt, synthetic construct
  source 1..19: mol_type = other RNA
ttcagcacaactcattctt

SEQ ID NO: 4861 - RNA, 19 nt, synthetic construct
  source 1..19: mol_type = other RNA
tcagcacaactcattcttc

SEQ ID NO: 4862 - RNA, 19 nt, synthetic construct
  source 1..19: mol_type = other RNA
cagcacaactcattcttca

SEQ ID NO: 4863 - RNA, 19 nt, synthetic construct
  source 1..19: mol_type = other RNA
agcacaactcattcttcag

SEQ ID NO: 4864 - RNA, 19 nt, synthetic construct
  source 1..19: mol_type = other RNA
gcacaactcattcttcagt

SEQ ID NO: 4865 - RNA, 19 nt, synthetic construct
  source 1..19: mol_type = other RNA
cacaactcattcttcagtg

SEQ ID NO: 4866 - RNA, 19 nt, synthetic construct
  source 1..19: mol_type = other RNA
acaactcattcttcagtgc

SEQ ID NO: 4867 - RNA, 19 nt, synthetic construct
  source 1..19: mol_type = other RNA
caactcattcttcagtgcc

SEQ ID NO: 4868 - RNA, 19 nt, synthetic construct
  source 1..19: mol_type = other RNA
aactcattcttcagtgcct

SEQ ID NO: 4869 - RNA, 19 nt, synthetic construct
  source 1..19: mol_type = other RNA
actcattcttcagtgcctc

SEQ ID NO: 4870 - RNA, 19 nt, synthetic construct
  source 1..19: mol_type = other RNA
ctcattcttcagtgcctca

SEQ ID NO: 4871 - RNA, 19 nt, synthetic construct
  source 1..19: mol_type = other RNA
tcattcttcagtgcctcat

SEQ ID NO: 4872 - RNA, 19 nt, synthetic construct
  source 1..19: mol_type = other RNA
cattcttcagtgcctcatg

SEQ ID NO: 4873 - RNA, 19 nt, synthetic construct
  source 1..19: mol_type = other RNA
attcttcagtgcctcatga

SEQ ID NO: 4874 - RNA, 19 nt, synthetic construct
  source 1..19: mol_type = other RNA
ttcttcagtgcctcatgac

SEQ ID NO: 4875 - RNA, 19 nt, synthetic construct
  source 1..19: mol_type = other RNA
tcttcagtgcctcatgact

SEQ ID NO: 4876 - RNA, 19 nt, synthetic construct
  source 1..19: mol_type = other RNA
cttcagtgcctcatgactg

SEQ ID NO: 4877 - RNA, 19 nt, synthetic construct
  source 1..19: mol_type = other RNA
ttcagtgcctcatgactga

SEQ ID NO: 4878 - RNA, 19 nt, synthetic construct
  source 1..19: mol_type = other RNA
tcagtgcctcatgactgaa

SEQ ID NO: 4879 - RNA, 19 nt, synthetic construct
  source 1..19: mol_type = other RNA
cagtgcctcatgactgaaa

SEQ ID NO: 4880 - RNA, 19 nt, synthetic construct
  source 1..19: mol_type = other RNA
agtgcctcatgactgaaaa

SEQ ID NO: 4881 - RNA, 19 nt, synthetic construct
  source 1..19: mol_type = other RNA
gtgcctcatgactgaaaac

SEQ ID NO: 4882 - RNA, 19 nt, synthetic construct
  source 1..19: mol_type = other RNA
tgcctcatgactgaaaaca

SEQ ID NO: 4883 - RNA, 19 nt, synthetic construct
  source 1..19: mol_type = other RNA
gcctcatgactgaaaacaa

SEQ ID NO: 4884 - RNA, 19 nt, synthetic construct
  source 1..19: mol_type = other RNA
cctcatgactgaaaacaaa

SEQ ID NO: 4885 - RNA, 19 nt, synthetic construct
  source 1..19: mol_type = other RNA
ctcatgactgaaaacaaaa

SEQ ID NO: 4886 - RNA, 19 nt, synthetic construct
  source 1..19: mol_type = other RNA
tcatgactgaaaacaaaaa

SEQ ID NO: 4887 - RNA, 19 nt, synthetic construct
  source 1..19: mol_type = other RNA
catgactgaaaacaaaaaa

SEQ ID NO: 4888 - RNA, 19 nt, synthetic construct
  source 1..19: mol_type = other RNA
atgactgaaaacaaaaaac

SEQ ID NO: 4889 - RNA, 19 nt, synthetic construct
  source 1..19: mol_type = other RNA
tgactgaaaacaaaaaaca

SEQ ID NO: 4890 - RNA, 19 nt, synthetic construct
  source 1..19: mol_type = other RNA
gactgaaaacaaaaaacaa

SEQ ID NO: 4891 - RNA, 19 nt, synthetic construct
  source 1..19: mol_type = other RNA
actgaaaacaaaaaacaaa

SEQ ID NO: 4892 - RNA, 19 nt, synthetic construct
  source 1..19: mol_type = other RNA
ctgaaaacaaaaaacaaaa

SEQ ID NO: 4893 - RNA, 19 nt, synthetic construct
  source 1..19: mol_type = other RNA
tgaaaacaaaaaacaaaaa

SEQ ID NO: 4894 - RNA, 19 nt, synthetic construct
  source 1..19: mol_type = other RNA
gaaaacaaaaaacaaaaaa

SEQ ID NO: 4895 - RNA, 19 nt, synthetic construct
  source 1..19: mol_type = other RNA
aaaacaaaaaacaaaaaaa

SEQ ID NO: 4896 - RNA, 19 nt, synthetic construct
  source 1..19: mol_type = other RNA
aaacaaaaaacaaaaaaac

SEQ ID NO: 4897 - RNA, 19 nt, synthetic construct
  source 1..19: mol_type = other RNA
aacaaaaaacaaaaaaacg

SEQ ID NO: 4898 - RNA, 19 nt, synthetic construct
  source 1..19: mol_type = other RNA
acaaaaaacaaaaaaacga

SEQ ID NO: 4899 - RNA, 19 nt, synthetic construct
  source 1..19: mol_type = other RNA
caaaaaacaaaaaaacgaa

SEQ ID NO: 4900 - RNA, 19 nt, synthetic construct
  source 1..19: mol_type = other RNA
aaaaaacaaaaaaacgaaa

SEQ ID NO: 4901 - RNA, 19 nt, synthetic construct
  source 1..19: mol_type = other RNA
aaaaacaaaaaaacgaaag

SEQ ID NO: 4902 - RNA, 19 nt, synthetic construct
  source 1..19: mol_type = other RNA
aaaacaaaaaaacgaaagc

SEQ ID NO: 4903 - RNA, 19 nt, synthetic construct
  source 1..19: mol_type = other RNA
aaacaaaaaaacgaaagca

SEQ ID NO: 4904 - RNA, 19 nt, synthetic construct
  source 1..19: mol_type = other RNA
aacaaaaaaacgaaagcat

SEQ ID NO: 4905 - RNA, 19 nt, synthetic construct
  source 1..19: mol_type = other RNA
acaaaaaaacgaaagcatc

SEQ ID NO: 4906 - RNA, 19 nt, synthetic construct
  source 1..19: mol_type = other RNA
caaaaaaacgaaagcatct

SEQ ID NO: 4907 - RNA, 19 nt, synthetic construct
  source 1..19: mol_type = other RNA
aaaaaaacgaaagcatctt

SEQ ID NO: 4908 - RNA, 19 nt, synthetic construct
  source 1..19: mol_type = other RNA
aaaaaacgaaagcatcttc

SEQ ID NO: 4909 - RNA, 19 nt, synthetic construct
  source 1..19: mol_type = other RNA
aaaaacgaaagcatcttca

SEQ ID NO: 4910 - RNA, 19 nt, synthetic construct
  source 1..19: mol_type = other RNA
aaaacgaaagcatcttcac

SEQ ID NO: 4911 - RNA, 19 nt, synthetic construct
  source 1..19: mol_type = other RNA
aaacgaaagcatcttcaca

SEQ ID NO: 4912 - RNA, 19 nt, synthetic construct
  source 1..19: mol_type = other RNA
aacgaaagcatcttcacaa

SEQ ID NO: 4913 - RNA, 19 nt, synthetic construct
  source 1..19: mol_type = other RNA
acgaaagcatcttcacaat

SEQ ID NO: 4914 - RNA, 19 nt, synthetic construct
  source 1..19: mol_type = other RNA
cgaaagcatcttcacaatg

SEQ ID NO: 4915 - RNA, 19 nt, synthetic construct
  source 1..19: mol_type = other RNA
gaaagcatcttcacaatga

SEQ ID NO: 4916 - RNA, 19 nt, synthetic construct
  source 1..19: mol_type = other RNA
aaagcatcttcacaatgaa

SEQ ID NO: 4917 - RNA, 19 nt, synthetic construct
  source 1..19: mol_type = other RNA
aagcatcttcacaatgaag

SEQ ID NO: 4918 - RNA, 19 nt, synthetic construct
  source 1..19: mol_type = other RNA
agcatcttcacaatgaagc

SEQ ID NO: 4919 - RNA, 19 nt, synthetic construct
  source 1..19: mol_type = other RNA
gcatcttcacaatgaagct

SEQ ID NO: 4920 - RNA, 19 nt, synthetic construct
  source 1..19: mol_type = other RNA
catcttcacaatgaagctt

SEQ ID NO: 4921 - RNA, 19 nt, synthetic construct
  source 1..19: mol_type = other RNA
atcttcacaatgaagcttc

SEQ ID NO: 4922 - RNA, 19 nt, synthetic construct
  source 1..19: mol_type = other RNA
tcttcacaatgaagcttcc

SEQ ID NO: 4923 - RNA, 19 nt, synthetic construct
  source 1..19: mol_type = other RNA
cttcacaatgaagcttcca

SEQ ID NO: 4924 - RNA, 19 nt, synthetic construct
  source 1..19: mol_type = other RNA
ttcacaatgaagcttccag

SEQ ID NO: 4925 - RNA, 19 nt, synthetic construct
  source 1..19: mol_type = other RNA
tcacaatgaagcttccaga

SEQ ID NO: 4926 - RNA, 19 nt, synthetic construct
  source 1..19: mol_type = other RNA
cacaatgaagcttccagat

SEQ ID NO: 4927 - RNA, 19 nt, synthetic construct
  source 1..19: mol_type = other RNA
acaatgaagcttccagata

SEQ ID NO: 4928 - RNA, 19 nt, synthetic construct
  source 1..19: mol_type = other RNA
caatgaagcttccagatag

SEQ ID NO: 4929 - RNA, 19 nt, synthetic construct
  source 1..19: mol_type = other RNA
aatgaagcttccagatagc

SEQ ID NO: 4930 - RNA, 19 nt, synthetic construct
  source 1..19: mol_type = other RNA
atgaagcttccagatagca

SEQ ID NO: 4931 - RNA, 19 nt, synthetic construct
  source 1..19: mol_type = other RNA
tgaagcttccagatagcac

SEQ ID NO: 4932 - RNA, 19 nt, synthetic construct
  source 1..19: mol_type = other RNA
gaagcttccagatagcacc

SEQ ID NO: 4933 - RNA, 19 nt, synthetic construct
  source 1..19: mol_type = other RNA
aagcttccagatagcaccg

SEQ ID NO: 4934 - RNA, 19 nt, synthetic construct
  source 1..19: mol_type = other RNA
agcttccagatagcaccgt

SEQ ID NO: 4935 - RNA, 19 nt, synthetic construct
  source 1..19: mol_type = other RNA
gcttccagatagcaccgtt

SEQ ID NO: 4936 - RNA, 19 nt, synthetic construct
  source 1..19: mol_type = other RNA
cttccagatagcaccgttt

SEQ ID NO: 4937 - RNA, 19 nt, synthetic construct
  source 1..19: mol_type = other RNA
ttccagatagcaccgtttt

SEQ ID NO: 4938 - RNA, 19 nt, synthetic construct
  source 1..19: mol_type = other RNA
tccagatagcaccgttttg

SEQ ID NO: 4939 - RNA, 19 nt, synthetic construct
  source 1..19: mol_type = other RNA
ccagatagcaccgttttgc

SEQ ID NO: 4940 - RNA, 19 nt, synthetic construct
  source 1..19: mol_type = other RNA
cagatagcaccgttttgct

SEQ ID NO: 4941 - RNA, 19 nt, synthetic construct
  source 1..19: mol_type = other RNA
agatagcaccgttttgcta

SEQ ID NO: 4942 - RNA, 19 nt, synthetic construct
  source 1..19: mol_type = other RNA
gatagcaccgttttgctaa

SEQ ID NO: 4943 - RNA, 19 nt, synthetic construct
  source 1..19: mol_type = other RNA
atagcaccgttttgctaaa

SEQ ID NO: 4944 - RNA, 19 nt, synthetic construct
  source 1..19: mol_type = other RNA
tagcaccgttttgctaaaa

SEQ ID NO: 4945 - RNA, 19 nt, synthetic construct
  source 1..19: mol_type = other RNA
agcaccgttttgctaaaag

SEQ ID NO: 4946 - RNA, 19 nt, synthetic construct
  source 1..19: mol_type = other RNA
gcaccgttttgctaaaaga

SEQ ID NO: 4947 - RNA, 19 nt, synthetic construct
  source 1..19: mol_type = other RNA
caccgttttgctaaaagat

SEQ ID NO: 4948 - RNA, 19 nt, synthetic construct
  source 1..19: mol_type = other RNA
accgttttgctaaaagata

SEQ ID NO: 4949 - RNA, 19 nt, synthetic construct
  source 1..19: mol_type = other RNA
ccgttttgctaaaagatac

SEQ ID NO: 4950 - RNA, 19 nt, synthetic construct
  source 1..19: mol_type = other RNA
cgttttgctaaaagataca

SEQ ID NO: 4951 - RNA, 19 nt, synthetic construct
  source 1..19: mol_type = other RNA
gttttgctaaaagatacat

SEQ ID NO: 4952 - RNA, 19 nt, synthetic construct
  source 1..19: mol_type = other RNA
ttttgctaaaagatacatt

SEQ ID NO: 4953 - RNA, 19 nt, synthetic construct
  source 1..19: mol_type = other RNA
tttgctaaaagatacattc

SEQ ID NO: 4954 - RNA, 19 nt, synthetic construct
  source 1..19: mol_type = other RNA
ttgctaaaagatacattct

SEQ ID NO: 4955 - RNA, 19 nt, synthetic construct
  source 1..19: mol_type = other RNA
tgctaaaagatacattctc

SEQ ID NO: 4956 - RNA, 19 nt, synthetic construct
  source 1..19: mol_type = other RNA
gctaaaagatacattctca

SEQ ID NO: 4957 - RNA, 19 nt, synthetic construct
  source 1..19: mol_type = other RNA
ctaaaagatacattctcat

SEQ ID NO: 4958 - RNA, 19 nt, synthetic construct
  source 1..19: mol_type = other RNA
taaaagatacattctcatt

SEQ ID NO: 4959 - RNA, 19 nt, synthetic construct
  source 1..19: mol_type = other RNA
aaaagatacattctcattg

SEQ ID NO: 4960 - RNA, 19 nt, synthetic construct
  source 1..19: mol_type = other RNA
aaagatacattctcattgt

SEQ ID NO: 4961 - RNA, 19 nt, synthetic construct
  source 1..19: mol_type = other RNA
aagatacattctcattgtt

SEQ ID NO: 4962 - RNA, 19 nt, synthetic construct
  source 1..19: mol_type = other RNA
agatacattctcattgttt

SEQ ID NO: 4963 - RNA, 19 nt, synthetic construct
  source 1..19: mol_type = other RNA
gatacattctcattgtttt

SEQ ID NO: 4964 - RNA, 19 nt, synthetic construct
  source 1..19: mol_type = other RNA
atacattctcattgttttc

SEQ ID NO: 4965 - RNA, 19 nt, synthetic construct
  source 1..19: mol_type = other RNA
tacattctcattgttttcc

SEQ ID NO: 4966 - RNA, 19 nt, synthetic construct
  source 1..19: mol_type = other RNA
acattctcattgttttcca

SEQ ID NO: 4967 - RNA, 19 nt, synthetic construct
  source 1..19: mol_type = other RNA
cattctcattgttttccaa

SEQ ID NO: 4968 - RNA, 19 nt, synthetic construct
  source 1..19: mol_type = other RNA
attctcattgttttccaac

SEQ ID NO: 4969 - RNA, 19 nt, synthetic construct
  source 1..19: mol_type = other RNA
ttctcattgttttccaaca

SEQ ID NO: 4970 - RNA, 19 nt, synthetic construct
  source 1..19: mol_type = other RNA
tctcattgttttccaacag

SEQ ID NO: 4971 - RNA, 19 nt, synthetic construct
  source 1..19: mol_type = other RNA
ctcattgttttccaacagt

SEQ ID NO: 4972 - RNA, 19 nt, synthetic construct
  source 1..19: mol_type = other RNA
tcattgttttccaacagtg

SEQ ID NO: 4973 - RNA, 19 nt, synthetic construct
  source 1..19: mol_type = other RNA
cattgttttccaacagtga

SEQ ID NO: 4974 - RNA, 19 nt, synthetic construct
  source 1..19: mol_type = other RNA
attgttttccaacagtgat

SEQ ID NO: 4975 - RNA, 19 nt, synthetic construct
  source 1..19: mol_type = other RNA
ttgttttccaacagtgatg

SEQ ID NO: 4976 - RNA, 19 nt, synthetic construct
  source 1..19: mol_type = other RNA
tgttttccaacagtgatgg

SEQ ID NO: 4977 - RNA, 19 nt, synthetic construct
  source 1..19: mol_type = other RNA
gttttccaacagtgatggc

SEQ ID NO: 4978 - RNA, 19 nt, synthetic construct
  source 1..19: mol_type = other RNA
ttttccaacagtgatggct

SEQ ID NO: 4979 - RNA, 19 nt, synthetic construct
  source 1..19: mol_type = other RNA
tttccaacagtgatggctt

SEQ ID NO: 4980 - RNA, 19 nt, synthetic construct
  source 1..19: mol_type = other RNA
ttccaacagtgatggcttc

SEQ ID NO: 4981 - RNA, 19 nt, synthetic construct
  source 1..19: mol_type = other RNA
tccaacagtgatggcttcc

SEQ ID NO: 4982 - RNA, 19 nt, synthetic construct
  source 1..19: mol_type = other RNA
ccaacagtgatggcttcca

SEQ ID NO: 4983 - RNA, 19 nt, synthetic construct
  source 1..19: mol_type = other RNA
caacagtgatggcttccac

SEQ ID NO: 4984 - RNA, 19 nt, synthetic construct
  source 1..19: mol_type = other RNA
aacagtgatggcttccaca

SEQ ID NO: 4985 - RNA, 19 nt, synthetic construct
  source 1..19: mol_type = other RNA
acagtgatggcttccacat

SEQ ID NO: 4986 - RNA, 19 nt, synthetic construct
  source 1..19: mol_type = other RNA
cagtgatggcttccacata

SEQ ID NO: 4987 - RNA, 19 nt, synthetic construct
  source 1..19: mol_type = other RNA
agtgatggcttccacataa

SEQ ID NO: 4988 - RNA, 19 nt, synthetic construct
  source 1..19: mol_type = other RNA
gtgatggcttccacataag

SEQ ID NO: 4989 - RNA, 19 nt, synthetic construct
  source 1..19: mol_type = other RNA
tgatggcttccacataagg

SEQ ID NO: 4990 - RNA, 19 nt, synthetic construct
  source 1..19: mol_type = other RNA
gatggcttccacataaggt

SEQ ID NO: 4991 - RNA, 19 nt, synthetic construct
  source 1..19: mol_type = other RNA
atggcttccacataaggtt

SEQ ID NO: 4992 - RNA, 19 nt, synthetic construct
  source 1..19: mol_type = other RNA
tggcttccacataaggtta

SEQ ID NO: 4993 - RNA, 19 nt, synthetic construct
  source 1..19: mol_type = other RNA
ggcttccacataaggttaa

SEQ ID NO: 4994 - RNA, 19 nt, synthetic construct
  source 1..19: mol_type = other RNA
gcttccacataaggttaaa

SEQ ID NO: 4995 - RNA, 19 nt, synthetic construct
  source 1..19: mol_type = other RNA
cttccacataaggttaaac

SEQ ID NO: 4996 - RNA, 19 nt, synthetic construct
  source 1..19: mol_type = other RNA
ttccacataaggttaaaca

SEQ ID NO: 4997 - RNA, 19 nt, synthetic construct
  source 1..19: mol_type = other RNA
tccacataaggttaaacaa

SEQ ID NO: 4998 - RNA, 19 nt, synthetic construct
  source 1..19: mol_type = other RNA
ccacataaggttaaacaaa

SEQ ID NO: 4999 - RNA, 19 nt, synthetic construct
  source 1..19: mol_type = other RNA
cacataaggttaaacaaac

SEQ ID NO: 5000 - RNA, 19 nt, synthetic construct
  source 1..19: mol_type = other RNA
acataaggttaaacaaact

SEQ ID NO: 5001 - RNA, 19 nt, synthetic construct
  source 1..19: mol_type = other RNA
cataaggttaaacaaacta

SEQ ID NO: 5002 - RNA, 19 nt, synthetic construct
  source 1..19: mol_type = other RNA
ataaggttaaacaaactag

SEQ ID NO: 5003 - RNA, 19 nt, synthetic construct
  source 1..19: mol_type = other RNA
taaggttaaacaaactagg

SEQ ID NO: 5004 - RNA, 19 nt, synthetic construct
  source 1..19: mol_type = other RNA
aaggttaaacaaactaggt

SEQ ID NO: 5005 - RNA, 19 nt, synthetic construct
  source 1..19: mol_type = other RNA
aggttaaacaaactaggtg

SEQ ID NO: 5006 - RNA, 19 nt, synthetic construct
  source 1..19: mol_type = other RNA
ggttaaacaaactaggtgc

SEQ ID NO: 5007 - RNA, 19 nt, synthetic construct
  source 1..19: mol_type = other RNA
gttaaacaaactaggtgct

SEQ ID NO: 5008 - RNA, 19 nt, synthetic construct
  source 1..19: mol_type = other RNA
ttaaacaaactaggtgctt

SEQ ID NO: 5009 - RNA, 19 nt, synthetic construct
  source 1..19: mol_type = other RNA
taaacaaactaggtgcttg

SEQ ID NO: 5010 - RNA, 19 nt, synthetic construct
  source 1..19: mol_type = other RNA
aaacaaactaggtgcttgt

SEQ ID NO: 5011 - RNA, 19 nt, synthetic construct
  source 1..19: mol_type = other RNA
aacaaactaggtgcttgta

SEQ ID NO: 5012 - RNA, 19 nt, synthetic construct
  source 1..19: mol_type = other RNA
acaaactaggtgcttgtaa

SEQ ID NO: 5013 - RNA, 19 nt, synthetic construct
  source 1..19: mol_type = other RNA
caaactaggtgcttgtaaa

SEQ ID NO: 5014 - RNA, 19 nt, synthetic construct
  source 1..19: mol_type = other RNA
aaactaggtgcttgtaaat

SEQ ID NO: 5015 - RNA, 19 nt, synthetic construct
  source 1..19: mol_type = other RNA
aactaggtgcttgtaaata

SEQ ID NO: 5016 - RNA, 19 nt, synthetic construct
  source 1..19: mol_type = other RNA
actaggtgcttgtaaataa

SEQ ID NO: 5017 - RNA, 19 nt, synthetic construct
  source 1..19: mol_type = other RNA
ctaggtgcttgtaaataat

SEQ ID NO: 5018 - RNA, 19 nt, synthetic construct
  source 1..19: mol_type = other RNA
taggtgcttgtaaataatt

SEQ ID NO: 5019 - RNA, 19 nt, synthetic construct
  source 1..19: mol_type = other RNA
aggtgcttgtaaataattt

SEQ ID NO: 5020 - RNA, 19 nt, synthetic construct
  source 1..19: mol_type = other RNA
ggtgcttgtaaataattta

SEQ ID NO: 5021 - RNA, 19 nt, synthetic construct
  source 1..19: mol_type = other RNA
gtgcttgtaaataatttat

SEQ ID NO: 5022 - RNA, 19 nt, synthetic construct
  source 1..19: mol_type = other RNA
tgcttgtaaataatttatt

SEQ ID NO: 5023 - RNA, 19 nt, synthetic construct
  source 1..19: mol_type = other RNA
gcttgtaaataatttatta

SEQ ID NO: 5024 - RNA, 19 nt, synthetic construct
  source 1..19: mol_type = other RNA
cttgtaaataatttattac

SEQ ID NO: 5025 - RNA, 19 nt, synthetic construct
  source 1..19: mol_type = other RNA
ttgtaaataatttattaca

SEQ ID NO: 5026 - RNA, 19 nt, synthetic construct
  source 1..19: mol_type = other RNA
tgtaaataatttattacag

SEQ ID NO: 5027 - RNA, 19 nt, synthetic construct
  source 1..19: mol_type = other RNA
gtaaataatttattacagt

SEQ ID NO: 5028 - RNA, 19 nt, synthetic construct
  source 1..19: mol_type = other RNA
taaataatttattacagtt

SEQ ID NO: 5029 - RNA, 19 nt, synthetic construct
  source 1..19: mol_type = other RNA
aaataatttattacagttt

SEQ ID NO: 5030 - RNA, 19 nt, synthetic construct
  source 1..19: mol_type = other RNA
aataatttattacagttta

SEQ ID NO: 5031 - RNA, 19 nt, synthetic construct
  source 1..19: mol_type = other RNA
ataatttattacagtttac

SEQ ID NO: 5032 - RNA, 19 nt, synthetic construct
  source 1..19: mol_type = other RNA
taatttattacagtttact

SEQ ID NO: 5033 - RNA, 19 nt, synthetic construct
  source 1..19: mol_type = other RNA
aatttattacagtttactc

SEQ ID NO: 5034 - RNA, 19 nt, synthetic construct
  source 1..19: mol_type = other RNA
atttattacagtttactct

SEQ ID NO: 5035 - RNA, 19 nt, synthetic construct
  source 1..19: mol_type = other RNA
tttattacagtttactcta

SEQ ID NO: 5036 - RNA, 19 nt, synthetic construct
  source 1..19: mol_type = other RNA
ttattacagtttactctat

SEQ ID NO: 5037 - RNA, 19 nt, synthetic construct
  source 1..19: mol_type = other RNA
tattacagtttactctatc

SEQ ID NO: 5038 - RNA, 19 nt, synthetic construct
  source 1..19: mol_type = other RNA
attacagtttactctatcg

SEQ ID NO: 5039 - RNA, 19 nt, synthetic construct
  source 1..19: mol_type = other RNA
ttacagtttactctatcgc

SEQ ID NO: 5040 - RNA, 19 nt, synthetic construct
  source 1..19: mol_type = other RNA
tacagtttactctatcgca

SEQ ID NO: 5041 - RNA, 19 nt, synthetic construct
  source 1..19: mol_type = other RNA
acagtttactctatcgcat

SEQ ID NO: 5042 - RNA, 19 nt, synthetic construct
  source 1..19: mol_type = other RNA
cagtttactctatcgcatt

SEQ ID NO: 5043 - RNA, 19 nt, synthetic construct
  source 1..19: mol_type = other RNA
agtttactctatcgcattt

SEQ ID NO: 5044 - RNA, 19 nt, synthetic construct
  source 1..19: mol_type = other RNA
gtttactctatcgcatttc

SEQ ID NO: 5045 - RNA, 19 nt, synthetic construct
  source 1..19: mol_type = other RNA
tttactctatcgcatttct

SEQ ID NO: 5046 - RNA, 19 nt, synthetic construct
  source 1..19: mol_type = other RNA
ttactctatcgcatttctg

SEQ ID NO: 5047 - RNA, 19 nt, synthetic construct
  source 1..19: mol_type = other RNA
tactctatcgcatttctgt

SEQ ID NO: 5048 - RNA, 19 nt, synthetic construct
  source 1..19: mol_type = other RNA
actctatcgcatttctgta

SEQ ID NO: 5049 - RNA, 19 nt, synthetic construct
  source 1..19: mol_type = other RNA
ctctatcgcatttctgtaa

SEQ ID NO: 5050 - RNA, 19 nt, synthetic construct
  source 1..19: mol_type = other RNA
tctatcgcatttctgtaac

SEQ ID NO: 5051 - RNA, 19 nt, synthetic construct
  source 1..19: mol_type = other RNA
ctatcgcatttctgtaaca

SEQ ID NO: 5052 - RNA, 19 nt, synthetic construct
  source 1..19: mol_type = other RNA
tatcgcatttctgtaacat

SEQ ID NO: 5053 - RNA, 19 nt, synthetic construct
  source 1..19: mol_type = other RNA
atcgcatttctgtaacatg

SEQ ID NO: 5054 - RNA, 19 nt, synthetic construct
  source 1..19: mol_type = other RNA
tcgcatttctgtaacatga

SEQ ID NO: 5055 - RNA, 19 nt, synthetic construct
  source 1..19: mol_type = other RNA
cgcatttctgtaacatgaa

SEQ ID NO: 5056 - RNA, 19 nt, synthetic construct
  source 1..19: mol_type = other RNA
gcatttctgtaacatgaaa

SEQ ID NO: 5057 - RNA, 19 nt, synthetic construct
  source 1..19: mol_type = other RNA
catttctgtaacatgaaat

SEQ ID NO: 5058 - RNA, 19 nt, synthetic construct
  source 1..19: mol_type = other RNA
atttctgtaacatgaaatg

SEQ ID NO: 5059 - RNA, 19 nt, synthetic construct
  source 1..19: mol_type = other RNA
tttctgtaacatgaaatgc

SEQ ID NO: 5060 - RNA, 19 nt, synthetic construct
  source 1..19: mol_type = other RNA
ttctgtaacatgaaatgca

SEQ ID NO: 5061 - RNA, 19 nt, synthetic construct
  source 1..19: mol_type = other RNA
tctgtaacatgaaatgcat

SEQ ID NO: 5062 - RNA, 19 nt, synthetic construct
  source 1..19: mol_type = other RNA
ctgtaacatgaaatgcatg

SEQ ID NO: 5063 - RNA, 19 nt, synthetic construct
  source 1..19: mol_type = other RNA
tgtaacatgaaatgcatgc

SEQ ID NO: 5064 - RNA, 19 nt, synthetic construct
  source 1..19: mol_type = other RNA
gtaacatgaaatgcatgcc

SEQ ID NO: 5065 - RNA, 19 nt, synthetic construct
  source 1..19: mol_type = other RNA
taacatgaaatgcatgccc

SEQ ID NO: 5066 - RNA, 19 nt, synthetic construct
  source 1..19: mol_type = other RNA
aacatgaaatgcatgccct

SEQ ID NO: 5067 - RNA, 19 nt, synthetic construct
  source 1..19: mol_type = other RNA
acatgaaatgcatgccctt

SEQ ID NO: 5068 - RNA, 19 nt, synthetic construct
  source 1..19: mol_type = other RNA
catgaaatgcatgcccttc

SEQ ID NO: 5069 - RNA, 19 nt, synthetic construct
  source 1..19: mol_type = other RNA
atgaaatgcatgcccttct

SEQ ID NO: 5070 - RNA, 19 nt, synthetic construct
  source 1..19: mol_type = other RNA
tgaaatgcatgcccttctt

SEQ ID NO: 5071 - RNA, 19 nt, synthetic construct
  source 1..19: mol_type = other RNA
gaaatgcatgcccttcttc

SEQ ID NO: 5072 - RNA, 19 nt, synthetic construct
  source 1..19: mol_type = other RNA
aaatgcatgcccttcttca

SEQ ID NO: 5073 - RNA, 19 nt, synthetic construct
  source 1..19: mol_type = other RNA
aatgcatgcccttcttcag

SEQ ID NO: 5074 - RNA, 19 nt, synthetic construct
  source 1..19: mol_type = other RNA
atgcatgcccttcttcagg

SEQ ID NO: 5075 - RNA, 19 nt, synthetic construct
  source 1..19: mol_type = other RNA
tgcatgcccttcttcaggg

SEQ ID NO: 5076 - RNA, 19 nt, synthetic construct
  source 1..19: mol_type = other RNA
gcatgcccttcttcagggg

SEQ ID NO: 5077 - RNA, 19 nt, synthetic construct
  source 1..19: mol_type = other RNA
catgcccttcttcagggga

SEQ ID NO: 5078 - RNA, 19 nt, synthetic construct
  source 1..19: mol_type = other RNA
atgcccttcttcaggggaa

SEQ ID NO: 5079 - RNA, 19 nt, synthetic construct
  source 1..19: mol_type = other RNA
tgcccttcttcaggggaag

SEQ ID NO: 5080 - RNA, 19 nt, synthetic construct
  source 1..19: mol_type = other RNA
gcccttcttcaggggaaga

SEQ ID NO: 5081 - RNA, 19 nt, synthetic construct
  source 1..19: mol_type = other RNA
cccttcttcaggggaagac

SEQ ID NO: 5082 - RNA, 19 nt, synthetic construct
  source 1..19: mol_type = other RNA
ccttcttcaggggaagact

SEQ ID NO: 5083 - RNA, 19 nt, synthetic construct
  source 1..19: mol_type = other RNA
cttcttcaggggaagactg

SEQ ID NO: 5084 - RNA, 19 nt, synthetic construct
  source 1..19: mol_type = other RNA
ttcttcaggggaagactgt

SEQ ID NO: 5085 - RNA, 19 nt, synthetic construct
  source 1..19: mol_type = other RNA
tcttcaggggaagactgtg

SEQ ID NO: 5086 - RNA, 19 nt, synthetic construct
  source 1..19: mol_type = other RNA
cttcaggggaagactgtgg

SEQ ID NO: 5087 - RNA, 19 nt, synthetic construct
  source 1..19: mol_type = other RNA
ttcaggggaagactgtggt

SEQ ID NO: 5088 - RNA, 19 nt, synthetic construct
  source 1..19: mol_type = other RNA
tcaggggaagactgtggtc

SEQ ID NO: 5089 - RNA, 19 nt, synthetic construct
  source 1..19: mol_type = other RNA
caggggaagactgtggtca

SEQ ID NO: 5090 - RNA, 19 nt, synthetic construct
  source 1..19: mol_type = other RNA
aggggaagactgtggtcaa

SEQ ID NO: 5091 - RNA, 19 nt, synthetic construct
  source 1..19: mol_type = other RNA
ggggaagactgtggtcaag

SEQ ID NO: 5092 - RNA, 19 nt, synthetic construct
  source 1..19: mol_type = other RNA
gggaagactgtggtcaagt

SEQ ID NO: 5093 - RNA, 19 nt, synthetic construct
  source 1..19: mol_type = other RNA
ggaagactgtggtcaagtt

SEQ ID NO: 5094 - RNA, 19 nt, synthetic construct
  source 1..19: mol_type = other RNA
gaagactgtggtcaagtta

SEQ ID NO: 5095 - RNA, 19 nt, synthetic construct
  source 1..19: mol_type = other RNA
aagactgtggtcaagttaa

SEQ ID NO: 5096 - RNA, 19 nt, synthetic construct
  source 1..19: mol_type = other RNA
agactgtggtcaagttaaa

SEQ ID NO: 5097 - RNA, 19 nt, synthetic construct
  source 1..19: mol_type = other RNA
gactgtggtcaagttaaaa

SEQ ID NO: 5098 - RNA, 19 nt, synthetic construct
  source 1..19: mol_type = other RNA
actgtggtcaagttaaaaa

SEQ ID NO: 5099 - RNA, 19 nt, synthetic construct
  source 1..19: mol_type = other RNA
ctgtggtcaagttaaaaaa

SEQ ID NO: 5100 - RNA, 19 nt, synthetic construct
  source 1..19: mol_type = other RNA
tgtggtcaagttaaaaaaa

SEQ ID NO: 5101 - RNA, 19 nt, synthetic construct
  source 1..19: mol_type = other RNA
gtggtcaagttaaaaaaaa

SEQ ID NO: 5102 - RNA, 19 nt, synthetic construct
  source 1..19: mol_type = other RNA
tggtcaagttaaaaaaaaa

SEQ ID NO: 5103 - RNA, 19 nt, synthetic construct
  source 1..19: mol_type = other RNA
ggtcaagttaaaaaaaaaa

SEQ ID NO: 5104 - RNA, 19 nt, synthetic construct
  source 1..19: mol_type = other RNA
gtcaagttaaaaaaaaaaa

SEQ ID NO: 5105 - RNA, 19 nt, synthetic construct
  source 1..19: mol_type = other RNA
tcaagttaaaaaaaaaaaa

SEQ ID NO: 5106 - RNA, 19 nt, synthetic construct
  source 1..19: mol_type = other RNA
caagttaaaaaaaaaaaac

SEQ ID NO: 5107 - RNA, 19 nt, synthetic construct
  source 1..19: mol_type = other RNA
aagttaaaaaaaaaaaaca

SEQ ID NO: 5108 - RNA, 19 nt, synthetic construct
  source 1..19: mol_type = other RNA
agttaaaaaaaaaaaacaa

SEQ ID NO: 5109 - RNA, 19 nt, synthetic construct
  source 1..19: mol_type = other RNA
gttaaaaaaaaaaaacaat

SEQ ID NO: 5110 - RNA, 19 nt, synthetic construct
  source 1..19: mol_type = other RNA
ttaaaaaaaaaaaacaata

SEQ ID NO: 5111 - RNA, 19 nt, synthetic construct
  source 1..19: mol_type = other RNA
taaaaaaaaaaaacaatat

SEQ ID NO: 5112 - RNA, 19 nt, synthetic construct
  source 1..19: mol_type = other RNA
aaaaaaaaaaaacaatatt

SEQ ID NO: 5113 - RNA, 19 nt, synthetic construct
  source 1..19: mol_type = other RNA
aaaaaaaaaaacaatatta

SEQ ID NO: 5114 - RNA, 19 nt, synthetic construct
  source 1..19: mol_type = other RNA
aaaaaaaaaacaatattaa

SEQ ID NO: 5115 - RNA, 19 nt, synthetic construct
  source 1..19: mol_type = other RNA
aaaaaaaaacaatattaaa

SEQ ID NO: 5116 - RNA, 19 nt, synthetic construct
  source 1..19: mol_type = other RNA
aaaaaaaacaatattaaac

SEQ ID NO: 5117 - RNA, 19 nt, synthetic construct
  source 1..19: mol_type = other RNA
aaaaaaacaatattaaaca

SEQ ID NO: 5118 - RNA, 19 nt, synthetic construct
  source 1..19: mol_type = other RNA
aaaaaacaatattaaacaa

SEQ ID NO: 5119 - RNA, 19 nt, synthetic construct
  source 1..19: mol_type = other RNA
aaaaacaatattaaacaac

SEQ ID NO: 5120 - RNA, 19 nt, synthetic construct
  source 1..19: mol_type = other RNA
aaaacaatattaaacaaca

SEQ ID NO: 5121 - RNA, 19 nt, synthetic construct
  source 1..19: mol_type = other RNA
aaacaatattaaacaacat

SEQ ID NO: 5122 - RNA, 19 nt, synthetic construct
  source 1..19: mol_type = other RNA
aacaatattaaacaacatg

SEQ ID NO: 5123 - RNA, 19 nt, synthetic construct
  source 1..19: mol_type = other RNA
acaatattaaacaacatga

SEQ ID NO: 5124 - RNA, 19 nt, synthetic construct
  source 1..19: mol_type = other RNA
caatattaaacaacatgaa

SEQ ID NO: 5125 - RNA, 19 nt, synthetic construct
  source 1..19: mol_type = other RNA
aatattaaacaacatgaaa

SEQ ID NO: 5126 - RNA, 19 nt, synthetic construct
  source 1..19: mol_type = other RNA
atattaaacaacatgaaac

SEQ ID NO: 5127 - RNA, 19 nt, synthetic construct
  source 1..19: mol_type = other RNA
tattaaacaacatgaaact

SEQ ID NO: 5128 - RNA, 19 nt, synthetic construct
  source 1..19: mol_type = other RNA
attaaacaacatgaaactg

SEQ ID NO: 5129 - RNA, 19 nt, synthetic construct
  source 1..19: mol_type = other RNA
ttaaacaacatgaaactgc

SEQ ID NO: 5130 - RNA, 19 nt, synthetic construct
  source 1..19: mol_type = other RNA
taaacaacatgaaactgca

SEQ ID NO: 5131 - RNA, 19 nt, synthetic construct
  source 1..19: mol_type = other RNA
aaacaacatgaaactgcag

SEQ ID NO: 5132 - RNA, 19 nt, synthetic construct
  source 1..19: mol_type = other RNA
aacaacatgaaactgcagt

SEQ ID NO: 5133 - RNA, 19 nt, synthetic construct
  source 1..19: mol_type = other RNA
acaacatgaaactgcagtc

SEQ ID NO: 5134 - RNA, 19 nt, synthetic construct
  source 1..19: mol_type = other RNA
caacatgaaactgcagtct

SEQ ID NO: 5135 - RNA, 19 nt, synthetic construct
  source 1..19: mol_type = other RNA
aacatgaaactgcagtctg

SEQ ID NO: 5136 - RNA, 19 nt, synthetic construct
  source 1..19: mol_type = other RNA
acatgaaactgcagtctgt

SEQ ID NO: 5137 - RNA, 19 nt, synthetic construct
  source 1..19: mol_type = other RNA
catgaaactgcagtctgtt

SEQ ID NO: 5138 - RNA, 19 nt, synthetic construct
  source 1..19: mol_type = other RNA
atgaaactgcagtctgttt

SEQ ID NO: 5139 - RNA, 19 nt, synthetic construct
  source 1..19: mol_type = other RNA
tgaaactgcagtctgtttt

SEQ ID NO: 5140 - RNA, 19 nt, synthetic construct
  source 1..19: mol_type = other RNA
gaaactgcagtctgttttt

SEQ ID NO: 5141 - RNA, 19 nt, synthetic construct
  source 1..19: mol_type = other RNA
aaactgcagtctgtttttg

SEQ ID NO: 5142 - RNA, 19 nt, synthetic construct
  source 1..19: mol_type = other RNA
aactgcagtctgtttttga

SEQ ID NO: 5143 - RNA, 19 nt, synthetic construct
  source 1..19: mol_type = other RNA
actgcagtctgtttttgaa

SEQ ID NO: 5144 - RNA, 19 nt, synthetic construct
  source 1..19: mol_type = other RNA
ctgcagtctgtttttgaaa

SEQ ID NO: 5145 - RNA, 19 nt, synthetic construct
  source 1..19: mol_type = other RNA
tgcagtctgtttttgaaaa

SEQ ID NO: 5146 - RNA, 19 nt, synthetic construct
  source 1..19: mol_type = other RNA
gcagtctgtttttgaaaat

SEQ ID NO: 5147 - RNA, 19 nt, synthetic construct
  source 1..19: mol_type = other RNA
cagtctgtttttgaaaatg

SEQ ID NO: 5148 - RNA, 19 nt, synthetic construct
  source 1..19: mol_type = other RNA
agtctgtttttgaaaatga

SEQ ID NO: 5149 - RNA, 19 nt, synthetic construct
  source 1..19: mol_type = other RNA
gtctgtttttgaaaatgag

SEQ ID NO: 5150 - RNA, 19 nt, synthetic construct
  source 1..19: mol_type = other RNA
tctgtttttgaaaatgaga

SEQ ID NO: 5151 - RNA, 19 nt, synthetic construct
  source 1..19: mol_type = other RNA
ctgtttttgaaaatgagaa

SEQ ID NO: 5152 - RNA, 19 nt, synthetic construct
  source 1..19: mol_type = other RNA
tgtttttgaaaatgagaat

SEQ ID NO: 5153 - RNA, 19 nt, synthetic construct
  source 1..19: mol_type = other RNA
gtttttgaaaatgagaatg

SEQ ID NO: 5154 - RNA, 19 nt, synthetic construct
  source 1..19: mol_type = other RNA
tttttgaaaatgagaatgt

SEQ ID NO: 5155 - RNA, 19 nt, synthetic construct
  source 1..19: mol_type = other RNA
ttttgaaaatgagaatgtc

SEQ ID NO: 5156 - RNA, 19 nt, synthetic construct
  source 1..19: mol_type = other RNA
tttgaaaatgagaatgtcc

SEQ ID NO: 5157 - RNA, 19 nt, synthetic construct
  source 1..19: mol_type = other RNA
ttgaaaatgagaatgtcct

SEQ ID NO: 5158 - RNA, 19 nt, synthetic construct
  source 1..19: mol_type = other RNA
tgaaaatgagaatgtccta

SEQ ID NO: 5159 - RNA, 19 nt, synthetic construct
  source 1..19: mol_type = other RNA
gaaaatgagaatgtcctaa

SEQ ID NO: 5160 - RNA, 19 nt, synthetic construct
  source 1..19: mol_type = other RNA
aaaatgagaatgtcctaag

SEQ ID NO: 5161 - RNA, 19 nt, synthetic construct
  source 1..19: mol_type = other RNA
aaatgagaatgtcctaagt

SEQ ID NO: 5162 - RNA, 19 nt, synthetic construct
  source 1..19: mol_type = other RNA
aatgagaatgtcctaagtg

SEQ ID NO: 5163 - RNA, 19 nt, synthetic construct
  source 1..19: mol_type = other RNA
atgagaatgtcctaagtga

SEQ ID NO: 5164 - RNA, 19 nt, synthetic construct
  source 1..19: mol_type = other RNA
tgagaatgtcctaagtgat

SEQ ID NO: 5165 - RNA, 19 nt, synthetic construct
  source 1..19: mol_type = other RNA
gagaatgtcctaagtgatt

SEQ ID NO: 5166 - RNA, 19 nt, synthetic construct
  source 1..19: mol_type = other RNA
agaatgtcctaagtgattc

SEQ ID NO: 5167 - RNA, 19 nt, synthetic construct
  source 1..19: mol_type = other RNA
gaatgtcctaagtgattca

SEQ ID NO: 5168 - RNA, 19 nt, synthetic construct
  source 1..19: mol_type = other RNA
aatgtcctaagtgattcag

SEQ ID NO: 5169 - RNA, 19 nt, synthetic construct
  source 1..19: mol_type = other RNA
atgtcctaagtgattcaga

SEQ ID NO: 5170 - RNA, 19 nt, synthetic construct
  source 1..19: mol_type = other RNA
tgtcctaagtgattcagaa

SEQ ID NO: 5171 - RNA, 19 nt, synthetic construct
  source 1..19: mol_type = other RNA
gtcctaagtgattcagaag

SEQ ID NO: 5172 - RNA, 19 nt, synthetic construct
  source 1..19: mol_type = other RNA
tcctaagtgattcagaaga

SEQ ID NO: 5173 - RNA, 19 nt, synthetic construct
  source 1..19: mol_type = other RNA
cctaagtgattcagaagag

SEQ ID NO: 5174 - RNA, 19 nt, synthetic construct
  source 1..19: mol_type = other RNA
ctaagtgattcagaagaga

SEQ ID NO: 5175 - RNA, 19 nt, synthetic construct
  source 1..19: mol_type = other RNA
taagtgattcagaagagag

SEQ ID NO: 5176 - RNA, 19 nt, synthetic construct
  source 1..19: mol_type = other RNA
aagtgattcagaagagagg

SEQ ID NO: 5177 - RNA, 19 nt, synthetic construct
  source 1..19: mol_type = other RNA
agtgattcagaagagagga

SEQ ID NO: 5178 - RNA, 19 nt, synthetic construct
  source 1..19: mol_type = other RNA
gtgattcagaagagaggag

SEQ ID NO: 5179 - RNA, 19 nt, synthetic construct
  source 1..19: mol_type = other RNA
tgattcagaagagaggagg

SEQ ID NO: 5180 - RNA, 19 nt, synthetic construct
  source 1..19: mol_type = other RNA
gattcagaagagaggaggg

SEQ ID NO: 5181 - RNA, 19 nt, synthetic construct
  source 1..19: mol_type = other RNA
attcagaagagaggaggga

SEQ ID NO: 5182 - RNA, 19 nt, synthetic construct
  source 1..19: mol_type = other RNA
ttcagaagagaggagggaa

SEQ ID NO: 5183 - RNA, 19 nt, synthetic construct
  source 1..19: mol_type = other RNA
tcagaagagaggagggaag

SEQ ID NO: 5184 - RNA, 19 nt, synthetic construct
  source 1..19: mol_type = other RNA
cagaagagaggagggaagt

SEQ ID NO: 5185 - RNA, 19 nt, synthetic construct
  source 1..19: mol_type = other RNA
agaagagaggagggaagtt

SEQ ID NO: 5186 - RNA, 19 nt, synthetic construct
  source 1..19: mol_type = other RNA
gaagagaggagggaagttg

SEQ ID NO: 5187 - RNA, 19 nt, synthetic construct
  source 1..19: mol_type = other RNA
aagagaggagggaagttgt

SEQ ID NO: 5188 - RNA, 19 nt, synthetic construct
  source 1..19: mol_type = other RNA
agagaggagggaagttgtg

SEQ ID NO: 5189 - RNA, 19 nt, synthetic construct
  source 1..19: mol_type = other RNA
gagaggagggaagttgtgc

SEQ ID NO: 5190 - RNA, 19 nt, synthetic construct
  source 1..19: mol_type = other RNA
agaggagggaagttgtgca

SEQ ID NO: 5191 - RNA, 19 nt, synthetic construct
  source 1..19: mol_type = other RNA
gaggagggaagttgtgcac

SEQ ID NO: 5192 - RNA, 19 nt, synthetic construct
  source 1..19: mol_type = other RNA
aggagggaagttgtgcact

SEQ ID NO: 5193 - RNA, 19 nt, synthetic construct
  source 1..19: mol_type = other RNA
ggagggaagttgtgcactc

SEQ ID NO: 5194 - RNA, 19 nt, synthetic construct
  source 1..19: mol_type = other RNA
gagggaagttgtgcactct

SEQ ID NO: 5195 - RNA, 19 nt, synthetic construct
  source 1..19: mol_type = other RNA
agggaagttgtgcactctg

SEQ ID NO: 5196 - RNA, 19 nt, synthetic construct
  source 1..19: mol_type = other RNA
gggaagttgtgcactctga

SEQ ID NO: 5197 - RNA, 19 nt, synthetic construct
  source 1..19: mol_type = other RNA
ggaagttgtgcactctgaa

SEQ ID NO: 5198 - RNA, 19 nt, synthetic construct
  source 1..19: mol_type = other RNA
gaagttgtgcactctgaaa

SEQ ID NO: 5199 - RNA, 19 nt, synthetic construct
  source 1..19: mol_type = other RNA
aagttgtgcactctgaaaa

SEQ ID NO: 5200 - RNA, 19 nt, synthetic construct
  source 1..19: mol_type = other RNA
agttgtgcactctgaaaat

SEQ ID NO: 5201 - RNA, 19 nt, synthetic construct
  source 1..19: mol_type = other RNA
gttgtgcactctgaaaatg

SEQ ID NO: 5202 - RNA, 19 nt, synthetic construct
  source 1..19: mol_type = other RNA
ttgtgcactctgaaaatgc

SEQ ID NO: 5203 - RNA, 19 nt, synthetic construct
  source 1..19: mol_type = other RNA
tgtgcactctgaaaatgca

SEQ ID NO: 5204 - RNA, 19 nt, synthetic construct
  source 1..19: mol_type = other RNA
gtgcactctgaaaatgcat

SEQ ID NO: 5205 - RNA, 19 nt, synthetic construct
  source 1..19: mol_type = other RNA
tgcactctgaaaatgcatg

SEQ ID NO: 5206 - RNA, 19 nt, synthetic construct
  source 1..19: mol_type = other RNA
gcactctgaaaatgcatga

SEQ ID NO: 5207 - RNA, 19 nt, synthetic construct
  source 1..19: mol_type = other RNA
cactctgaaaatgcatgaa

SEQ ID NO: 5208 - RNA, 19 nt, synthetic construct
  source 1..19: mol_type = other RNA
actctgaaaatgcatgaaa

SEQ ID NO: 5209 - RNA, 19 nt, synthetic construct
  source 1..19: mol_type = other RNA
ctctgaaaatgcatgaaaa

SEQ ID NO: 5210 - RNA, 19 nt, synthetic construct
  source 1..19: mol_type = other RNA
tctgaaaatgcatgaaaaa

SEQ ID NO: 5211 - RNA, 19 nt, synthetic construct
  source 1..19: mol_type = other RNA
ctgaaaatgcatgaaaaac

SEQ ID NO: 5212 - RNA, 19 nt, synthetic construct
  source 1..19: mol_type = other RNA
tgaaaatgcatgaaaaaca

SEQ ID NO: 5213 - RNA, 19 nt, synthetic construct
  source 1..19: mol_type = other RNA
gaaaatgcatgaaaaacaa

SEQ ID NO: 5214 - RNA, 19 nt, synthetic construct
  source 1..19: mol_type = other RNA
aaaatgcatgaaaaacaaa

SEQ ID NO: 5215 - RNA, 19 nt, synthetic construct
  source 1..19: mol_type = other RNA
aaatgcatgaaaaacaaag

SEQ ID NO: 5216 - RNA, 19 nt, synthetic construct
  source 1..19: mol_type = other RNA
aatgcatgaaaaacaaagg

SEQ ID NO: 5217 - RNA, 19 nt, synthetic construct
  source 1..19: mol_type = other RNA
atgcatgaaaaacaaaggc

SEQ ID NO: 5218 - RNA, 19 nt, synthetic construct
  source 1..19: mol_type = other RNA
tgcatgaaaaacaaaggca

SEQ ID NO: 5219 - RNA, 19 nt, synthetic construct
  source 1..19: mol_type = other RNA
gcatgaaaaacaaaggcaa

SEQ ID NO: 5220 - RNA, 19 nt, synthetic construct
  source 1..19: mol_type = other RNA
catgaaaaacaaaggcaaa

SEQ ID NO: 5221 - RNA, 19 nt, synthetic construct
  source 1..19: mol_type = other RNA
atgaaaaacaaaggcaaaa

SEQ ID NO: 5222 - RNA, 19 nt, synthetic construct
  source 1..19: mol_type = other RNA
tgaaaaacaaaggcaaaaa

SEQ ID NO: 5223 - RNA, 19 nt, synthetic construct
  source 1..19: mol_type = other RNA
gaaaaacaaaggcaaaaac

SEQ ID NO: 5224 - RNA, 19 nt, synthetic construct
  source 1..19: mol_type = other RNA
aaaaacaaaggcaaaaact

SEQ ID NO: 5225 - RNA, 19 nt, synthetic construct
  source 1..19: mol_type = other RNA
aaaacaaaggcaaaaacta

SEQ ID NO: 5226 - RNA, 19 nt, synthetic construct
  source 1..19: mol_type = other RNA
aaacaaaggcaaaaactag

SEQ ID NO: 5227 - RNA, 19 nt, synthetic construct
  source 1..19: mol_type = other RNA
aacaaaggcaaaaactagt

SEQ ID NO: 5228 - RNA, 19 nt, synthetic construct
  source 1..19: mol_type = other RNA
acaaaggcaaaaactagtg

SEQ ID NO: 5229 - RNA, 19 nt, synthetic construct
  source 1..19: mol_type = other RNA
caaaggcaaaaactagtgg

SEQ ID NO: 5230 - RNA, 19 nt, synthetic construct
  source 1..19: mol_type = other RNA
aaaggcaaaaactagtggg

SEQ ID NO: 5231 - RNA, 19 nt, synthetic construct
  source 1..19: mol_type = other RNA
aaggcaaaaactagtggga

SEQ ID NO: 5232 - RNA, 19 nt, synthetic construct
  source 1..19: mol_type = other RNA
aggcaaaaactagtgggaa

SEQ ID NO: 5233 - RNA, 19 nt, synthetic construct
  source 1..19: mol_type = other RNA
ggcaaaaactagtgggaaa

SEQ ID NO: 5234 - RNA, 19 nt, synthetic construct
  source 1..19: mol_type = other RNA
gcaaaaactagtgggaaat

SEQ ID NO: 5235 - RNA, 19 nt, synthetic construct
  source 1..19: mol_type = other RNA
caaaaactagtgggaaatg

SEQ ID NO: 5236 - RNA, 19 nt, synthetic construct
  source 1..19: mol_type = other RNA
aaaaactagtgggaaatgt

SEQ ID NO: 5237 - RNA, 19 nt, synthetic construct
  source 1..19: mol_type = other RNA
aaaactagtgggaaatgtg

SEQ ID NO: 5238 - RNA, 19 nt, synthetic construct
  source 1..19: mol_type = other RNA
aaactagtgggaaatgtgt

SEQ ID NO: 5239 - RNA, 19 nt, synthetic construct
  source 1..19: mol_type = other RNA
aactagtgggaaatgtgta

SEQ ID NO: 5240 - RNA, 19 nt, synthetic construct
  source 1..19: mol_type = other RNA
actagtgggaaatgtgtag

SEQ ID NO: 5241 - RNA, 19 nt, synthetic construct
  source 1..19: mol_type = other RNA
ctagtgggaaatgtgtaga

SEQ ID NO: 5242 - RNA, 19 nt, synthetic construct
  source 1..19: mol_type = other RNA
tagtgggaaatgtgtagaa

SEQ ID NO: 5243 - RNA, 19 nt, synthetic construct
  source 1..19: mol_type = other RNA
agtgggaaatgtgtagaac

SEQ ID NO: 5244 - RNA, 19 nt, synthetic construct
  source 1..19: mol_type = other RNA
gtgggaaatgtgtagaact

SEQ ID NO: 5245 - RNA, 19 nt, synthetic construct
  source 1..19: mol_type = other RNA
tgggaaatgtgtagaactg

SEQ ID NO: 5246 - RNA, 19 nt, synthetic construct
  source 1..19: mol_type = other RNA
gggaaatgtgtagaactgt

SEQ ID NO: 5247 - RNA, 19 nt, synthetic construct
  source 1..19: mol_type = other RNA
ggaaatgtgtagaactgtt

SEQ ID NO: 5248 - RNA, 19 nt, synthetic construct
  source 1..19: mol_type = other RNA
gaaatgtgtagaactgtta

SEQ ID NO: 5249 - RNA, 19 nt, synthetic construct
  source 1..19: mol_type = other RNA
aaatgtgtagaactgttaa

SEQ ID NO: 5250 - RNA, 19 nt, synthetic construct
  source 1..19: mol_type = other RNA
aatgtgtagaactgttaac

SEQ ID NO: 5251 - RNA, 19 nt, synthetic construct
  source 1..19: mol_type = other RNA
atgtgtagaactgttaact

SEQ ID NO: 5252 - RNA, 19 nt, synthetic construct
  source 1..19: mol_type = other RNA
tgtgtagaactgttaactg

SEQ ID NO: 5253 - RNA, 19 nt, synthetic construct
  source 1..19: mol_type = other RNA
gtgtagaactgttaactga

SEQ ID NO: 5254 - RNA, 19 nt, synthetic construct
  source 1..19: mol_type = other RNA
tgtagaactgttaactgag

SEQ ID NO: 5255 - RNA, 19 nt, synthetic construct
  source 1..19: mol_type = other RNA
gtagaactgttaactgaga

SEQ ID NO: 5256 - RNA, 19 nt, synthetic construct
  source 1..19: mol_type = other RNA
tagaactgttaactgagat

SEQ ID NO: 5257 - RNA, 19 nt, synthetic construct
  source 1..19: mol_type = other RNA
agaactgttaactgagatg

SEQ ID NO: 5258 - RNA, 19 nt, synthetic construct
  source 1..19: mol_type = other RNA
gaactgttaactgagatgg

SEQ ID NO: 5259 - RNA, 19 nt, synthetic construct
  source 1..19: mol_type = other RNA
aactgttaactgagatggc

SEQ ID NO: 5260 - RNA, 19 nt, synthetic construct
  source 1..19: mol_type = other RNA
actgttaactgagatggct

SEQ ID NO: 5261 - RNA, 19 nt, synthetic construct
  source 1..19: mol_type = other RNA
ctgttaactgagatggctt

SEQ ID NO: 5262 - RNA, 19 nt, synthetic construct
  source 1..19: mol_type = other RNA
tgttaactgagatggcttc

SEQ ID NO: 5263 - RNA, 19 nt, synthetic construct
  source 1..19: mol_type = other RNA
gttaactgagatggcttcg

SEQ ID NO: 5264 - RNA, 19 nt, synthetic construct
  source 1..19: mol_type = other RNA
ttaactgagatggcttcga

SEQ ID NO: 5265 - RNA, 19 nt, synthetic construct
  source 1..19: mol_type = other RNA
taactgagatggcttcgag

SEQ ID NO: 5266 - RNA, 19 nt, synthetic construct
  source 1..19: mol_type = other RNA
aactgagatggcttcgagt

SEQ ID NO: 5267 - RNA, 19 nt, synthetic construct
  source 1..19: mol_type = other RNA
actgagatggcttcgagtc

SEQ ID NO: 5268 - RNA, 19 nt, synthetic construct
  source 1..19: mol_type = other RNA
ctgagatggcttcgagtct

SEQ ID NO: 5269 - RNA, 19 nt, synthetic construct
  source 1..19: mol_type = other RNA
tgagatggcttcgagtctt

SEQ ID NO: 5270 - RNA, 19 nt, synthetic construct
  source 1..19: mol_type = other RNA
gagatggcttcgagtcttc

SEQ ID NO: 5271 - RNA, 19 nt, synthetic construct
  source 1..19: mol_type = other RNA
agatggcttcgagtcttcc

SEQ ID NO: 5272 - RNA, 19 nt, synthetic construct
  source 1..19: mol_type = other RNA
gatggcttcgagtcttcct

SEQ ID NO: 5273 - RNA, 19 nt, synthetic construct
  source 1..19: mol_type = other RNA
atggcttcgagtcttcctt

SEQ ID NO: 5274 - RNA, 19 nt, synthetic construct
  source 1..19: mol_type = other RNA
tggcttcgagtcttccttc

SEQ ID NO: 5275 - RNA, 19 nt, synthetic construct
  source 1..19: mol_type = other RNA
ggcttcgagtcttccttct

SEQ ID NO: 5276 - RNA, 19 nt, synthetic construct
  source 1..19: mol_type = other RNA
gcttcgagtcttccttctg

SEQ ID NO: 5277 - RNA, 19 nt, synthetic construct
  source 1..19: mol_type = other RNA
cttcgagtcttccttctgg

SEQ ID NO: 5278 - RNA, 19 nt, synthetic construct
  source 1..19: mol_type = other RNA
ttcgagtcttccttctgga

SEQ ID NO: 5279 - RNA, 19 nt, synthetic construct
  source 1..19: mol_type = other RNA
tcgagtcttccttctggaa

SEQ ID NO: 5280 - RNA, 19 nt, synthetic construct
  source 1..19: mol_type = other RNA
cgagtcttccttctggaat

SEQ ID NO: 5281 - RNA, 19 nt, synthetic construct
  source 1..19: mol_type = other RNA
gagtcttccttctggaatc

SEQ ID NO: 5282 - RNA, 19 nt, synthetic construct
  source 1..19: mol_type = other RNA
agtcttccttctggaatct

SEQ ID NO: 5283 - RNA, 19 nt, synthetic construct
  source 1..19: mol_type = other RNA
gtcttccttctggaatctg

SEQ ID NO: 5284 - RNA, 19 nt, synthetic construct
  source 1..19: mol_type = other RNA
tcttccttctggaatctgt

SEQ ID NO: 5285 - RNA, 19 nt, synthetic construct
  source 1..19: mol_type = other RNA
cttccttctggaatctgtt

SEQ ID NO: 5286 - RNA, 19 nt, synthetic construct
  source 1..19: mol_type = other RNA
ttccttctggaatctgtta

SEQ ID NO: 5287 - RNA, 19 nt, synthetic construct
  source 1..19: mol_type = other RNA
tccttctggaatctgttaa

SEQ ID NO: 5288 - RNA, 19 nt, synthetic construct
  source 1..19: mol_type = other RNA
ccttctggaatctgttaaa

SEQ ID NO: 5289 - RNA, 19 nt, synthetic construct
  source 1..19: mol_type = other RNA
cttctggaatctgttaaat

SEQ ID NO: 5290 - RNA, 19 nt, synthetic construct
  source 1..19: mol_type = other RNA
ttctggaatctgttaaatt

SEQ ID NO: 5291 - RNA, 19 nt, synthetic construct
  source 1..19: mol_type = other RNA
tctggaatctgttaaattt

SEQ ID NO: 5292 - RNA, 19 nt, synthetic construct
  source 1..19: mol_type = other RNA
ctggaatctgttaaatttc

SEQ ID NO: 5293 - RNA, 19 nt, synthetic construct
  source 1..19: mol_type = other RNA
tggaatctgttaaatttca

SEQ ID NO: 5294 - RNA, 19 nt, synthetic construct
  source 1..19: mol_type = other RNA
ggaatctgttaaatttcac

SEQ ID NO: 5295 - RNA, 19 nt, synthetic construct
  source 1..19: mol_type = other RNA
gaatctgttaaatttcaca

SEQ ID NO: 5296 - RNA, 19 nt, synthetic construct
  source 1..19: mol_type = other RNA
aatctgttaaatttcacaa

SEQ ID NO: 5297 - RNA, 19 nt, synthetic construct
  source 1..19: mol_type = other RNA
atctgttaaatttcacaaa

SEQ ID NO: 5298 - RNA, 19 nt, synthetic construct
  source 1..19: mol_type = other RNA
tctgttaaatttcacaaag

SEQ ID NO: 5299 - RNA, 19 nt, synthetic construct
  source 1..19: mol_type = other RNA
ctgttaaatttcacaaagt

SEQ ID NO: 5300 - RNA, 19 nt, synthetic construct
  source 1..19: mol_type = other RNA
tgttaaatttcacaaagtc

SEQ ID NO: 5301 - RNA, 19 nt, synthetic construct
  source 1..19: mol_type = other RNA
gttaaatttcacaaagtca

SEQ ID NO: 5302 - RNA, 19 nt, synthetic construct
  source 1..19: mol_type = other RNA
ttaaatttcacaaagtcat

SEQ ID NO: 5303 - RNA, 19 nt, synthetic construct
  source 1..19: mol_type = other RNA
taaatttcacaaagtcatg

SEQ ID NO: 5304 - RNA, 19 nt, synthetic construct
  source 1..19: mol_type = other RNA
aaatttcacaaagtcatga

SEQ ID NO: 5305 - RNA, 19 nt, synthetic construct
  source 1..19: mol_type = other RNA
aatttcacaaagtcatgag

SEQ ID NO: 5306 - RNA, 19 nt, synthetic construct
  source 1..19: mol_type = other RNA
atttcacaaagtcatgagg

SEQ ID NO: 5307 - RNA, 19 nt, synthetic construct
  source 1..19: mol_type = other RNA
tttcacaaagtcatgaggg

SEQ ID NO: 5308 - RNA, 19 nt, synthetic construct
  source 1..19: mol_type = other RNA
ttcacaaagtcatgagggt

SEQ ID NO: 5309 - RNA, 19 nt, synthetic construct
  source 1..19: mol_type = other RNA
tcacaaagtcatgagggta

SEQ ID NO: 5310 - RNA, 19 nt, synthetic construct
  source 1..19: mol_type = other RNA
cacaaagtcatgagggtaa

SEQ ID NO: 5311 - RNA, 19 nt, synthetic construct
  source 1..19: mol_type = other RNA
acaaagtcatgagggtaaa

SEQ ID NO: 5312 - RNA, 19 nt, synthetic construct
  source 1..19: mol_type = other RNA
caaagtcatgagggtaaat

SEQ ID NO: 5313 - RNA, 19 nt, synthetic construct
  source 1..19: mol_type = other RNA
aaagtcatgagggtaaatg

SEQ ID NO: 5314 - RNA, 19 nt, synthetic construct
  source 1..19: mol_type = other RNA
aagtcatgagggtaaatgg

SEQ ID NO: 5315 - RNA, 19 nt, synthetic construct
  source 1..19: mol_type = other RNA
agtcatgagggtaaatgga

SEQ ID NO: 5316 - RNA, 19 nt, synthetic construct
  source 1..19: mol_type = other RNA
gtcatgagggtaaatggag

SEQ ID NO: 5317 - RNA, 19 nt, synthetic construct
  source 1..19: mol_type = other RNA
tcatgagggtaaatggaga

SEQ ID NO: 5318 - RNA, 19 nt, synthetic construct
  source 1..19: mol_type = other RNA
catgagggtaaatggagaa

SEQ ID NO: 5319 - RNA, 19 nt, synthetic construct
  source 1..19: mol_type = other RNA
atgagggtaaatggagaaa

SEQ ID NO: 5320 - RNA, 19 nt, synthetic construct
  source 1..19: mol_type = other RNA
tgagggtaaatggagaaaa

SEQ ID NO: 5321 - RNA, 19 nt, synthetic construct
  source 1..19: mol_type = other RNA
gagggtaaatggagaaaat

SEQ ID NO: 5322 - RNA, 19 nt, synthetic construct
  source 1..19: mol_type = other RNA
agggtaaatggagaaaata

SEQ ID NO: 5323 - RNA, 19 nt, synthetic construct
  source 1..19: mol_type = other RNA
gggtaaatggagaaaatat

SEQ ID NO: 5324 - RNA, 19 nt, synthetic construct
  source 1..19: mol_type = other RNA
ggtaaatggagaaaatatt

SEQ ID NO: 5325 - RNA, 19 nt, synthetic construct
  source 1..19: mol_type = other RNA
gtaaatggagaaaatattt

SEQ ID NO: 5326 - RNA, 19 nt, synthetic construct
  source 1..19: mol_type = other RNA
taaatggagaaaatatttc

SEQ ID NO: 5327 - RNA, 19 nt, synthetic construct
  source 1..19: mol_type = other RNA
aaatggagaaaatatttct

SEQ ID NO: 5328 - RNA, 19 nt, synthetic construct
  source 1..19: mol_type = other RNA
aatggagaaaatatttctg

SEQ ID NO: 5329 - RNA, 19 nt, synthetic construct
  source 1..19: mol_type = other RNA
atggagaaaatatttctgg

SEQ ID NO: 5330 - RNA, 19 nt, synthetic construct
  source 1..19: mol_type = other RNA
tggagaaaatatttctggg

SEQ ID NO: 5331 - RNA, 19 nt, synthetic construct
  source 1..19: mol_type = other RNA
ggagaaaatatttctggga

SEQ ID NO: 5332 - RNA, 19 nt, synthetic construct
  source 1..19: mol_type = other RNA
gagaaaatatttctgggat

SEQ ID NO: 5333 - RNA, 19 nt, synthetic construct
  source 1..19: mol_type = other RNA
agaaaatatttctgggatt

SEQ ID NO: 5334 - RNA, 19 nt, synthetic construct
  source 1..19: mol_type = other RNA
gaaaatatttctgggatta

SEQ ID NO: 5335 - RNA, 19 nt, synthetic construct
  source 1..19: mol_type = other RNA
aaaatatttctgggattac

SEQ ID NO: 5336 - RNA, 19 nt, synthetic construct
  source 1..19: mol_type = other RNA
aaatatttctgggattaca

SEQ ID NO: 5337 - RNA, 19 nt, synthetic construct
  source 1..19: mol_type = other RNA
aatatttctgggattacaa

SEQ ID NO: 5338 - RNA, 19 nt, synthetic construct
  source 1..19: mol_type = other RNA
atatttctgggattacaat

SEQ ID NO: 5339 - RNA, 19 nt, synthetic construct
  source 1..19: mol_type = other RNA
tatttctgggattacaatg

SEQ ID NO: 5340 - RNA, 19 nt, synthetic construct
  source 1..19: mol_type = other RNA
atttctgggattacaatga

SEQ ID NO: 5341 - RNA, 19 nt, synthetic construct
  source 1..19: mol_type = other RNA
tttctgggattacaatgaa

SEQ ID NO: 5342 - RNA, 19 nt, synthetic construct
  source 1..19: mol_type = other RNA
ttctgggattacaatgaat

SEQ ID NO: 5343 - RNA, 19 nt, synthetic construct
  source 1..19: mol_type = other RNA
tctgggattacaatgaatg

SEQ ID NO: 5344 - RNA, 19 nt, synthetic construct
  source 1..19: mol_type = other RNA
ctgggattacaatgaatgt

SEQ ID NO: 5345 - RNA, 19 nt, synthetic construct
  source 1..19: mol_type = other RNA
tgggattacaatgaatgta

SEQ ID NO: 5346 - RNA, 19 nt, synthetic construct
  source 1..19: mol_type = other RNA
gggattacaatgaatgtaa

SEQ ID NO: 5347 - RNA, 19 nt, synthetic construct
  source 1..19: mol_type = other RNA
ggattacaatgaatgtaag

SEQ ID NO: 5348 - RNA, 19 nt, synthetic construct
  source 1..19: mol_type = other RNA
gattacaatgaatgtaagc

SEQ ID NO: 5349 - RNA, 19 nt, synthetic construct
  source 1..19: mol_type = other RNA
attacaatgaatgtaagcc

SEQ ID NO: 5350 - RNA, 19 nt, synthetic construct
  source 1..19: mol_type = other RNA
ttacaatgaatgtaagccc

SEQ ID NO: 5351 - RNA, 19 nt, synthetic construct
  source 1..19: mol_type = other RNA
tacaatgaatgtaagccca

SEQ ID NO: 5352 - RNA, 19 nt, synthetic construct
  source 1..19: mol_type = other RNA
acaatgaatgtaagcccaa

SEQ ID NO: 5353 - RNA, 19 nt, synthetic construct
  source 1..19: mol_type = other RNA
caatgaatgtaagcccaaa

SEQ ID NO: 5354 - RNA, 19 nt, synthetic construct
  source 1..19: mol_type = other RNA
aatgaatgtaagcccaaat

SEQ ID NO: 5355 - RNA, 19 nt, synthetic construct
  source 1..19: mol_type = other RNA
atgaatgtaagcccaaatt

SEQ ID NO: 5356 - RNA, 19 nt, synthetic construct
  source 1..19: mol_type = other RNA
tgaatgtaagcccaaattg

SEQ ID NO: 5357 - RNA, 19 nt, synthetic construct
  source 1..19: mol_type = other RNA
gaatgtaagcccaaattgt

SEQ ID NO: 5358 - RNA, 19 nt, synthetic construct
  source 1..19: mol_type = other RNA
aatgtaagcccaaattgtg

SEQ ID NO: 5359 - RNA, 19 nt, synthetic construct
  source 1..19: mol_type = other RNA
atgtaagcccaaattgtgg

SEQ ID NO: 5360 - RNA, 19 nt, synthetic construct
  source 1..19: mol_type = other RNA
tgtaagcccaaattgtgga

SEQ ID NO: 5361 - RNA, 19 nt, synthetic construct
  source 1..19: mol_type = other RNA
gtaagcccaaattgtggaa

SEQ ID NO: 5362 - RNA, 19 nt, synthetic construct
  source 1..19: mol_type = other RNA
taagcccaaattgtggaat

SEQ ID NO: 5363 - RNA, 19 nt, synthetic construct
  source 1..19: mol_type = other RNA
aagcccaaattgtggaatt

SEQ ID NO: 5364 - RNA, 19 nt, synthetic construct
  source 1..19: mol_type = other RNA
agcccaaattgtggaattg

SEQ ID NO: 5365 - RNA, 19 nt, synthetic construct
  source 1..19: mol_type = other RNA
gcccaaattgtggaattgc

SEQ ID NO: 5366 - RNA, 19 nt, synthetic construct
  source 1..19: mol_type = other RNA
cccaaattgtggaattgcc

SEQ ID NO: 5367 - RNA, 19 nt, synthetic construct
  source 1..19: mol_type = other RNA
ccaaattgtggaattgcca

SEQ ID NO: 5368 - RNA, 19 nt, synthetic construct
  source 1..19: mol_type = other RNA
caaattgtggaattgccag

SEQ ID NO: 5369 - RNA, 19 nt, synthetic construct
  source 1..19: mol_type = other RNA
aaattgtggaattgccagt

SEQ ID NO: 5370 - RNA, 19 nt, synthetic construct
  source 1..19: mol_type = other RNA
aattgtggaattgccagta

SEQ ID NO: 5371 - RNA, 19 nt, synthetic construct
  source 1..19: mol_type = other RNA
attgtggaattgccagtaa

SEQ ID NO: 5372 - RNA, 19 nt, synthetic construct
  source 1..19: mol_type = other RNA
ttgtggaattgccagtaac

SEQ ID NO: 5373 - RNA, 19 nt, synthetic construct
  source 1..19: mol_type = other RNA
tgtggaattgccagtaacc

SEQ ID NO: 5374 - RNA, 19 nt, synthetic construct
  source 1..19: mol_type = other RNA
gtggaattgccagtaacct

SEQ ID NO: 5375 - RNA, 19 nt, synthetic construct
  source 1..19: mol_type = other RNA
tggaattgccagtaacctg

SEQ ID NO: 5376 - RNA, 19 nt, synthetic construct
  source 1..19: mol_type = other RNA
ggaattgccagtaacctgg

SEQ ID NO: 5377 - RNA, 19 nt, synthetic construct
  source 1..19: mol_type = other RNA
gaattgccagtaacctgga

SEQ ID NO: 5378 - RNA, 19 nt, synthetic construct
  source 1..19: mol_type = other RNA
aattgccagtaacctggat

SEQ ID NO: 5379 - RNA, 19 nt, synthetic construct
  source 1..19: mol_type = other RNA
attgccagtaacctggatg

SEQ ID NO: 5380 - RNA, 19 nt, synthetic construct
  source 1..19: mol_type = other RNA
ttgccagtaacctggatgg

SEQ ID NO: 5381 - RNA, 19 nt, synthetic construct
  source 1..19: mol_type = other RNA
tgccagtaacctggatggg

SEQ ID NO: 5382 - RNA, 19 nt, synthetic construct
  source 1..19: mol_type = other RNA
gccagtaacctggatgggg

SEQ ID NO: 5383 - RNA, 19 nt, synthetic construct
  source 1..19: mol_type = other RNA
ccagtaacctggatgggga

SEQ ID NO: 5384 - RNA, 19 nt, synthetic construct
  source 1..19: mol_type = other RNA
cagtaacctggatggggaa

SEQ ID NO: 5385 - RNA, 19 nt, synthetic construct
  source 1..19: mol_type = other RNA
agtaacctggatggggaaa

SEQ ID NO: 5386 - RNA, 19 nt, synthetic construct
  source 1..19: mol_type = other RNA
gtaacctggatggggaaaa

SEQ ID NO: 5387 - RNA, 19 nt, synthetic construct
  source 1..19: mol_type = other RNA
taacctggatggggaaaag

SEQ ID NO: 5388 - RNA, 19 nt, synthetic construct
  source 1..19: mol_type = other RNA
aacctggatggggaaaagc

SEQ ID NO: 5389 - RNA, 19 nt, synthetic construct
  source 1..19: mol_type = other RNA
acctggatggggaaaagca

SEQ ID NO: 5390 - RNA, 19 nt, synthetic construct
  source 1..19: mol_type = other RNA
cctggatggggaaaagcat

SEQ ID NO: 5391 - RNA, 19 nt, synthetic construct
  source 1..19: mol_type = other RNA
ctggatggggaaaagcatt

SEQ ID NO: 5392 - RNA, 19 nt, synthetic construct
  source 1..19: mol_type = other RNA
tggatggggaaaagcattt

SEQ ID NO: 5393 - RNA, 19 nt, synthetic construct
  source 1..19: mol_type = other RNA
ggatggggaaaagcatttc

SEQ ID NO: 5394 - RNA, 19 nt, synthetic construct
  source 1..19: mol_type = other RNA
gatggggaaaagcatttcc

SEQ ID NO: 5395 - RNA, 19 nt, synthetic construct
  source 1..19: mol_type = other RNA
atggggaaaagcatttccc

SEQ ID NO: 5396 - RNA, 19 nt, synthetic construct
  source 1..19: mol_type = other RNA
tggggaaaagcatttccca

SEQ ID NO: 5397 - RNA, 19 nt, synthetic construct
  source 1..19: mol_type = other RNA
ggggaaaagcatttcccat

SEQ ID NO: 5398 - RNA, 19 nt, synthetic construct
  source 1..19: mol_type = other RNA
gggaaaagcatttcccata

SEQ ID NO: 5399 - RNA, 19 nt, synthetic construct
  source 1..19: mol_type = other RNA
ggaaaagcatttcccatag

SEQ ID NO: 5400 - RNA, 19 nt, synthetic construct
  source 1..19: mol_type = other RNA
gaaaagcatttcccatagc

SEQ ID NO: 5401 - RNA, 19 nt, synthetic construct
  source 1..19: mol_type = other RNA
aaaagcatttcccatagca

SEQ ID NO: 5402 - RNA, 19 nt, synthetic construct
  source 1..19: mol_type = other RNA
aaagcatttcccatagcac

SEQ ID NO: 5403 - RNA, 19 nt, synthetic construct
  source 1..19: mol_type = other RNA
aagcatttcccatagcact

SEQ ID NO: 5404 - RNA, 19 nt, synthetic construct
  source 1..19: mol_type = other RNA
agcatttcccatagcactc

SEQ ID NO: 5405 - RNA, 19 nt, synthetic construct
  source 1..19: mol_type = other RNA
gcatttcccatagcactcc

SEQ ID NO: 5406 - RNA, 19 nt, synthetic construct
  source 1..19: mol_type = other RNA
catttcccatagcactcca

SEQ ID NO: 5407 - RNA, 19 nt, synthetic construct
  source 1..19: mol_type = other RNA
atttcccatagcactccat

SEQ ID NO: 5408 - RNA, 19 nt, synthetic construct
  source 1..19: mol_type = other RNA
tttcccatagcactccatg

SEQ ID NO: 5409 - RNA, 19 nt, synthetic construct
  source 1..19: mol_type = other RNA
ttcccatagcactccatgt

SEQ ID NO: 5410 - RNA, 19 nt, synthetic construct
  source 1..19: mol_type = other RNA
tcccatagcactccatgta

SEQ ID NO: 5411 - RNA, 19 nt, synthetic construct
  source 1..19: mol_type = other RNA
cccatagcactccatgtaa

SEQ ID NO: 5412 - RNA, 19 nt, synthetic construct
  source 1..19: mol_type = other RNA
ccatagcactccatgtaat

SEQ ID NO: 5413 - RNA, 19 nt, synthetic construct
  source 1..19: mol_type = other RNA
catagcactccatgtaata

SEQ ID NO: 5414 - RNA, 19 nt, synthetic construct
  source 1..19: mol_type = other RNA
atagcactccatgtaatat

SEQ ID NO: 5415 - RNA, 19 nt, synthetic construct
  source 1..19: mol_type = other RNA
tagcactccatgtaatatg

SEQ ID NO: 5416 - RNA, 19 nt, synthetic construct
  source 1..19: mol_type = other RNA
agcactccatgtaatatga

SEQ ID NO: 5417 - RNA, 19 nt, synthetic construct
  source 1..19: mol_type = other RNA
gcactccatgtaatatgag

SEQ ID NO: 5418 - RNA, 19 nt, synthetic construct
  source 1..19: mol_type = other RNA
cactccatgtaatatgagt

SEQ ID NO: 5419 - RNA, 19 nt, synthetic construct
  source 1..19: mol_type = other RNA
actccatgtaatatgagtg

SEQ ID NO: 5420 - RNA, 19 nt, synthetic construct
  source 1..19: mol_type = other RNA
ctccatgtaatatgagtgc

SEQ ID NO: 5421 - RNA, 19 nt, synthetic construct
  source 1..19: mol_type = other RNA
tccatgtaatatgagtgct

SEQ ID NO: 5422 - RNA, 19 nt, synthetic construct
  source 1..19: mol_type = other RNA
ccatgtaatatgagtgctc

SEQ ID NO: 5423 - RNA, 19 nt, synthetic construct
  source 1..19: mol_type = other RNA
catgtaatatgagtgctct

SEQ ID NO: 5424 - RNA, 19 nt, synthetic construct
  source 1..19: mol_type = other RNA
atgtaatatgagtgctctg

SEQ ID NO: 5425 - RNA, 19 nt, synthetic construct
  source 1..19: mol_type = other RNA
tgtaatatgagtgctctgt

SEQ ID NO: 5426 - RNA, 19 nt, synthetic construct
  source 1..19: mol_type = other RNA
gtaatatgagtgctctgtg

SEQ ID NO: 5427 - RNA, 19 nt, synthetic construct
  source 1..19: mol_type = other RNA
taatatgagtgctctgtga

SEQ ID NO: 5428 - RNA, 19 nt, synthetic construct
  source 1..19: mol_type = other RNA
aatatgagtgctctgtgag

SEQ ID NO: 5429 - RNA, 19 nt, synthetic construct
  source 1..19: mol_type = other RNA
atatgagtgctctgtgaga

SEQ ID NO: 5430 - RNA, 19 nt, synthetic construct
  source 1..19: mol_type = other RNA
tatgagtgctctgtgagat

SEQ ID NO: 5431 - RNA, 19 nt, synthetic construct
  source 1..19: mol_type = other RNA
atgagtgctctgtgagatg

SEQ ID NO: 5432 - RNA, 19 nt, synthetic construct
  source 1..19: mol_type = other RNA
tgagtgctctgtgagatgt

SEQ ID NO: 5433 - RNA, 19 nt, synthetic construct
  source 1..19: mol_type = other RNA
gagtgctctgtgagatgtt

SEQ ID NO: 5434 - RNA, 19 nt, synthetic construct
  source 1..19: mol_type = other RNA
agtgctctgtgagatgttc

SEQ ID NO: 5435 - RNA, 19 nt, synthetic construct
  source 1..19: mol_type = other RNA
gtgctctgtgagatgttca

SEQ ID NO: 5436 - RNA, 19 nt, synthetic construct
  source 1..19: mol_type = other RNA
tgctctgtgagatgttcat

SEQ ID NO: 5437 - RNA, 19 nt, synthetic construct
  source 1..19: mol_type = other RNA
gctctgtgagatgttcatc

SEQ ID NO: 5438 - RNA, 19 nt, synthetic construct
  source 1..19: mol_type = other RNA
ctctgtgagatgttcatca

SEQ ID NO: 5439 - RNA, 19 nt, synthetic construct
  source 1..19: mol_type = other RNA
tctgtgagatgttcatcag

SEQ ID NO: 5440 - RNA, 19 nt, synthetic construct
  source 1..19: mol_type = other RNA
ctgtgagatgttcatcagt

SEQ ID NO: 5441 - RNA, 19 nt, synthetic construct
  source 1..19: mol_type = other RNA
tgtgagatgttcatcagtg

SEQ ID NO: 5442 - RNA, 19 nt, synthetic construct
  source 1..19: mol_type = other RNA
gtgagatgttcatcagtgt

SEQ ID NO: 5443 - RNA, 19 nt, synthetic construct
  source 1..19: mol_type = other RNA
tgagatgttcatcagtgtt

SEQ ID NO: 5444 - RNA, 19 nt, synthetic construct
  source 1..19: mol_type = other RNA
gagatgttcatcagtgttt

SEQ ID NO: 5445 - RNA, 19 nt, synthetic construct
  source 1..19: mol_type = other RNA
agatgttcatcagtgtttt

SEQ ID NO: 5446 - RNA, 19 nt, synthetic construct
  source 1..19: mol_type = other RNA
gatgttcatcagtgtttta

SEQ ID NO: 5447 - RNA, 19 nt, synthetic construct
  source 1..19: mol_type = other RNA
atgttcatcagtgttttat

SEQ ID NO: 5448 - RNA, 19 nt, synthetic construct
  source 1..19: mol_type = other RNA
tgttcatcagtgttttata

SEQ ID NO: 5449 - RNA, 19 nt, synthetic construct
  source 1..19: mol_type = other RNA
gttcatcagtgttttatag

SEQ ID NO: 5450 - RNA, 19 nt, synthetic construct
  source 1..19: mol_type = other RNA
ttcatcagtgttttataga

SEQ ID NO: 5451 - RNA, 19 nt, synthetic construct
  source 1..19: mol_type = other RNA
tcatcagtgttttatagaa

SEQ ID NO: 5452 - RNA, 19 nt, synthetic construct
  source 1..19: mol_type = other RNA
catcagtgttttatagaaa

SEQ ID NO: 5453 - RNA, 19 nt, synthetic construct
  source 1..19: mol_type = other RNA
atcagtgttttatagaaat

SEQ ID NO: 5454 - RNA, 19 nt, synthetic construct
  source 1..19: mol_type = other RNA
tcagtgttttatagaaatg

SEQ ID NO: 5455 - RNA, 19 nt, synthetic construct
  source 1..19: mol_type = other RNA
cagtgttttatagaaatgg

SEQ ID NO: 5456 - RNA, 19 nt, synthetic construct
  source 1..19: mol_type = other RNA
agtgttttatagaaatggt

SEQ ID NO: 5457 - RNA, 19 nt, synthetic construct
  source 1..19: mol_type = other RNA
gtgttttatagaaatggtg

SEQ ID NO: 5458 - RNA, 19 nt, synthetic construct
  source 1..19: mol_type = other RNA
tgttttatagaaatggtgt

SEQ ID NO: 5459 - RNA, 19 nt, synthetic construct
  source 1..19: mol_type = other RNA
gttttatagaaatggtgtt

SEQ ID NO: 5460 - RNA, 19 nt, synthetic construct
  source 1..19: mol_type = other RNA
ttttatagaaatggtgttg

SEQ ID NO: 5461 - RNA, 19 nt, synthetic construct
  source 1..19: mol_type = other RNA
tttatagaaatggtgttgc

SEQ ID NO: 5462 - RNA, 19 nt, synthetic construct
  source 1..19: mol_type = other RNA
ttatagaaatggtgttgct

SEQ ID NO: 5463 - RNA, 19 nt, synthetic construct
  source 1..19: mol_type = other RNA
tatagaaatggtgttgctg

SEQ ID NO: 5464 - RNA, 19 nt, synthetic construct
  source 1..19: mol_type = other RNA
atagaaatggtgttgctgg

SEQ ID NO: 5465 - RNA, 19 nt, synthetic construct
  source 1..19: mol_type = other RNA
tagaaatggtgttgctggg

SEQ ID NO: 5466 - RNA, 19 nt, synthetic construct
  source 1..19: mol_type = other RNA
agaaatggtgttgctggga

SEQ ID NO: 5467 - RNA, 19 nt, synthetic construct
  source 1..19: mol_type = other RNA
gaaatggtgttgctgggaa

SEQ ID NO: 5468 - RNA, 19 nt, synthetic construct
  source 1..19: mol_type = other RNA
aaatggtgttgctgggaaa

SEQ ID NO: 5469 - RNA, 19 nt, synthetic construct
  source 1..19: mol_type = other RNA
aatggtgttgctgggaaac

SEQ ID NO: 5470 - RNA, 19 nt, synthetic construct
  source 1..19: mol_type = other RNA
atggtgttgctgggaaacc

SEQ ID NO: 5471 - RNA, 19 nt, synthetic construct
  source 1..19: mol_type = other RNA
tggtgttgctgggaaacca

SEQ ID NO: 5472 - RNA, 19 nt, synthetic construct
  source 1..19: mol_type = other RNA
ggtgttgctgggaaaccaa

SEQ ID NO: 5473 - RNA, 19 nt, synthetic construct
  source 1..19: mol_type = other RNA
gtgttgctgggaaaccaag

SEQ ID NO: 5474 - RNA, 19 nt, synthetic construct
  source 1..19: mol_type = other RNA
tgttgctgggaaaccaagt

SEQ ID NO: 5475 - RNA, 19 nt, synthetic construct
  source 1..19: mol_type = other RNA
gttgctgggaaaccaagtt

SEQ ID NO: 5476 - RNA, 19 nt, synthetic construct
  source 1..19: mol_type = other RNA
ttgctgggaaaccaagttt

SEQ ID NO: 5477 - RNA, 19 nt, synthetic construct
  source 1..19: mol_type = other RNA
tgctgggaaaccaagtttg

SEQ ID NO: 5478 - RNA, 19 nt, synthetic construct
  source 1..19: mol_type = other RNA
gctgggaaaccaagtttgc

SEQ ID NO: 5479 - RNA, 19 nt, synthetic construct
  source 1..19: mol_type = other RNA
ctgggaaaccaagtttgca

SEQ ID NO: 5480 - RNA, 19 nt, synthetic construct
  source 1..19: mol_type = other RNA
tgggaaaccaagtttgcac

SEQ ID NO: 5481 - RNA, 19 nt, synthetic construct
  source 1..19: mol_type = other RNA
gggaaaccaagtttgcacc

SEQ ID NO: 5482 - RNA, 19 nt, synthetic construct
  source 1..19: mol_type = other RNA
ggaaaccaagtttgcacct

SEQ ID NO: 5483 - RNA, 19 nt, synthetic construct
  source 1..19: mol_type = other RNA
gaaaccaagtttgcacctg

SEQ ID NO: 5484 - RNA, 19 nt, synthetic construct
  source 1..19: mol_type = other RNA
aaaccaagtttgcacctgg

SEQ ID NO: 5485 - RNA, 19 nt, synthetic construct
  source 1..19: mol_type = other RNA
aaccaagtttgcacctgga

SEQ ID NO: 5486 - RNA, 19 nt, synthetic construct
  source 1..19: mol_type = other RNA
accaagtttgcacctggaa

SEQ ID NO: 5487 - RNA, 19 nt, synthetic construct
  source 1..19: mol_type = other RNA
ccaagtttgcacctggaaa

SEQ ID NO: 5488 - RNA, 19 nt, synthetic construct
  source 1..19: mol_type = other RNA
caagtttgcacctggaaac

SEQ ID NO: 5489 - RNA, 19 nt, synthetic construct
  source 1..19: mol_type = other RNA
aagtttgcacctggaaact

SEQ ID NO: 5490 - RNA, 19 nt, synthetic construct
  source 1..19: mol_type = other RNA
agtttgcacctggaaactt

SEQ ID NO: 5491 - RNA, 19 nt, synthetic construct
  source 1..19: mol_type = other RNA
gtttgcacctggaaactta

SEQ ID NO: 5492 - RNA, 19 nt, synthetic construct
  source 1..19: mol_type = other RNA
tttgcacctggaaacttac

SEQ ID NO: 5493 - RNA, 19 nt, synthetic construct
  source 1..19: mol_type = other RNA
ttgcacctggaaacttaca

SEQ ID NO: 5494 - RNA, 19 nt, synthetic construct
  source 1..19: mol_type = other RNA
tgcacctggaaacttacaa

SEQ ID NO: 5495 - RNA, 19 nt, synthetic construct
  source 1..19: mol_type = other RNA
gcacctggaaacttacaat

SEQ ID NO: 5496 - RNA, 19 nt, synthetic construct
  source 1..19: mol_type = other RNA
cacctggaaacttacaatg

SEQ ID NO: 5497 - RNA, 19 nt, synthetic construct
  source 1..19: mol_type = other RNA
acctggaaacttacaatgc

SEQ ID NO: 5498 - RNA, 19 nt, synthetic construct
  source 1..19: mol_type = other RNA
cctggaaacttacaatgca

SEQ ID NO: 5499 - RNA, 19 nt, synthetic construct
  source 1..19: mol_type = other RNA
ctggaaacttacaatgcac

SEQ ID NO: 5500 - RNA, 19 nt, synthetic construct
  source 1..19: mol_type = other RNA
tggaaacttacaatgcact

SEQ ID NO: 5501 - RNA, 19 nt, synthetic construct
  source 1..19: mol_type = other RNA
ggaaacttacaatgcactt

SEQ ID NO: 5502 - RNA, 19 nt, synthetic construct
  source 1..19: mol_type = other RNA
gaaacttacaatgcacttt

SEQ ID NO: 5503 - RNA, 19 nt, synthetic construct
  source 1..19: mol_type = other RNA
aaacttacaatgcacttta

SEQ ID NO: 5504 - RNA, 19 nt, synthetic construct
  source 1..19: mol_type = other RNA
aacttacaatgcactttag

SEQ ID NO: 5505 - RNA, 19 nt, synthetic construct
  source 1..19: mol_type = other RNA
acttacaatgcactttagc

SEQ ID NO: 5506 - RNA, 19 nt, synthetic construct
  source 1..19: mol_type = other RNA
cttacaatgcactttagcg

SEQ ID NO: 5507 - RNA, 19 nt, synthetic construct
  source 1..19: mol_type = other RNA
ttacaatgcactttagcgc

SEQ ID NO: 5508 - RNA, 19 nt, synthetic construct
  source 1..19: mol_type = other RNA
tacaatgcactttagcgca

SEQ ID NO: 5509 - RNA, 19 nt, synthetic construct
  source 1..19: mol_type = other RNA
acaatgcactttagcgcag

SEQ ID NO: 5510 - RNA, 19 nt, synthetic construct
  source 1..19: mol_type = other RNA
caatgcactttagcgcagt

SEQ ID NO: 5511 - RNA, 19 nt, synthetic construct
  source 1..19: mol_type = other RNA
aatgcactttagcgcagta

SEQ ID NO: 5512 - RNA, 19 nt, synthetic construct
  source 1..19: mol_type = other RNA
atgcactttagcgcagtaa

SEQ ID NO: 5513 - RNA, 19 nt, synthetic construct
  source 1..19: mol_type = other RNA
tgcactttagcgcagtaag

SEQ ID NO: 5514 - RNA, 19 nt, synthetic construct
  source 1..19: mol_type = other RNA
gcactttagcgcagtaagg

SEQ ID NO: 5515 - RNA, 19 nt, synthetic construct
  source 1..19: mol_type = other RNA
cactttagcgcagtaaggg

SEQ ID NO: 5516 - RNA, 19 nt, synthetic construct
  source 1..19: mol_type = other RNA
actttagcgcagtaagggc

SEQ ID NO: 5517 - RNA, 19 nt, synthetic construct
  source 1..19: mol_type = other RNA
ctttagcgcagtaagggct

SEQ ID NO: 5518 - RNA, 19 nt, synthetic construct
  source 1..19: mol_type = other RNA
tttagcgcagtaagggctt

SEQ ID NO: 5519 - RNA, 19 nt, synthetic construct
  source 1..19: mol_type = other RNA
ttagcgcagtaagggcttg

SEQ ID NO: 5520 - RNA, 19 nt, synthetic construct
  source 1..19: mol_type = other RNA
tagcgcagtaagggcttgg

SEQ ID NO: 5521 - RNA, 19 nt, synthetic construct
  source 1..19: mol_type = other RNA
agcgcagtaagggcttggc

SEQ ID NO: 5522 - RNA, 19 nt, synthetic construct
  source 1..19: mol_type = other RNA
gcgcagtaagggcttggca

SEQ ID NO: 5523 - RNA, 19 nt, synthetic construct
  source 1..19: mol_type = other RNA
cgcagtaagggcttggcat

SEQ ID NO: 5524 - RNA, 19 nt, synthetic construct
  source 1..19: mol_type = other RNA
gcagtaagggcttggcatc

SEQ ID NO: 5525 - RNA, 19 nt, synthetic construct
  source 1..19: mol_type = other RNA
cagtaagggcttggcatcc

SEQ ID NO: 5526 - RNA, 19 nt, synthetic construct
  source 1..19: mol_type = other RNA
agtaagggcttggcatccg

SEQ ID NO: 5527 - RNA, 19 nt, synthetic construct
  source 1..19: mol_type = other RNA
gtaagggcttggcatccgg

SEQ ID NO: 5528 - RNA, 19 nt, synthetic construct
  source 1..19: mol_type = other RNA
taagggcttggcatccggt

SEQ ID NO: 5529 - RNA, 19 nt, synthetic construct
  source 1..19: mol_type = other RNA
aagggcttggcatccggta

SEQ ID NO: 5530 - RNA, 19 nt, synthetic construct
  source 1..19: mol_type = other RNA
agggcttggcatccggtag

SEQ ID NO: 5531 - RNA, 19 nt, synthetic construct
  source 1..19: mol_type = other RNA
gggcttggcatccggtagt

SEQ ID NO: 5532 - RNA, 19 nt, synthetic construct
  source 1..19: mol_type = other RNA
ggcttggcatccggtagtg

SEQ ID NO: 5533 - RNA, 19 nt, synthetic construct
  source 1..19: mol_type = other RNA
gcttggcatccggtagtga

SEQ ID NO: 5534 - RNA, 19 nt, synthetic construct
  source 1..19: mol_type = other RNA
cttggcatccggtagtgaa

SEQ ID NO: 5535 - RNA, 19 nt, synthetic construct
  source 1..19: mol_type = other RNA
ttggcatccggtagtgaaa

SEQ ID NO: 5536 - RNA, 19 nt, synthetic construct
  source 1..19: mol_type = other RNA
tggcatccggtagtgaaaa

SEQ ID NO: 5537 - RNA, 19 nt, synthetic construct
  source 1..19: mol_type = other RNA
ggcatccggtagtgaaaaa

SEQ ID NO: 5538 - RNA, 19 nt, synthetic construct
  source 1..19: mol_type = other RNA
gcatccggtagtgaaaaac

SEQ ID NO: 5539 - RNA, 19 nt, synthetic construct
  source 1..19: mol_type = other RNA
catccggtagtgaaaaact

SEQ ID NO: 5540 - RNA, 19 nt, synthetic construct
  source 1..19: mol_type = other RNA
atccggtagtgaaaaactg

SEQ ID NO: 5541 - RNA, 19 nt, synthetic construct
  source 1..19: mol_type = other RNA
tccggtagtgaaaaactgt

SEQ ID NO: 5542 - RNA, 19 nt, synthetic construct
  source 1..19: mol_type = other RNA
ccggtagtgaaaaactgtc

SEQ ID NO: 5543 - RNA, 19 nt, synthetic construct
  source 1..19: mol_type = other RNA
cggtagtgaaaaactgtct

SEQ ID NO: 5544 - RNA, 19 nt, synthetic construct
  source 1..19: mol_type = other RNA
ggtagtgaaaaactgtcta

SEQ ID NO: 5545 - RNA, 19 nt, synthetic construct
  source 1..19: mol_type = other RNA
gtagtgaaaaactgtctaa

SEQ ID NO: 5546 - RNA, 19 nt, synthetic construct
  source 1..19: mol_type = other RNA
tagtgaaaaactgtctaac

SEQ ID NO: 5547 - RNA, 19 nt, synthetic construct
  source 1..19: mol_type = other RNA
agtgaaaaactgtctaacc

SEQ ID NO: 5548 - RNA, 19 nt, synthetic construct
  source 1..19: mol_type = other RNA
gtgaaaaactgtctaaccc

SEQ ID NO: 5549 - RNA, 19 nt, synthetic construct
  source 1..19: mol_type = other RNA
tgaaaaactgtctaaccca

SEQ ID NO: 5550 - RNA, 19 nt, synthetic construct
  source 1..19: mol_type = other RNA
gaaaaactgtctaacccag

SEQ ID NO: 5551 - RNA, 19 nt, synthetic construct
  source 1..19: mol_type = other RNA
aaaaactgtctaacccagc

SEQ ID NO: 5552 - RNA, 19 nt, synthetic construct
  source 1..19: mol_type = other RNA
aaaactgtctaacccagca

SEQ ID NO: 5553 - RNA, 19 nt, synthetic construct
  source 1..19: mol_type = other RNA
aaactgtctaacccagcat

SEQ ID NO: 5554 - RNA, 19 nt, synthetic construct
  source 1..19: mol_type = other RNA
aactgtctaacccagcatt

SEQ ID NO: 5555 - RNA, 19 nt, synthetic construct
  source 1..19: mol_type = other RNA
actgtctaacccagcattg

SEQ ID NO: 5556 - RNA, 19 nt, synthetic construct
  source 1..19: mol_type = other RNA
ctgtctaacccagcattgc

SEQ ID NO: 5557 - RNA, 19 nt, synthetic construct
  source 1..19: mol_type = other RNA
tgtctaacccagcattgcc

SEQ ID NO: 5558 - RNA, 19 nt, synthetic construct
  source 1..19: mol_type = other RNA
gtctaacccagcattgccc

SEQ ID NO: 5559 - RNA, 19 nt, synthetic construct
  source 1..19: mol_type = other RNA
tctaacccagcattgccca

SEQ ID NO: 5560 - RNA, 19 nt, synthetic construct
  source 1..19: mol_type = other RNA
ctaacccagcattgcccaa

SEQ ID NO: 5561 - RNA, 19 nt, synthetic construct
  source 1..19: mol_type = other RNA
taacccagcattgcccaaa

SEQ ID NO: 5562 - RNA, 19 nt, synthetic construct
  source 1..19: mol_type = other RNA
aacccagcattgcccaaac

SEQ ID NO: 5563 - RNA, 19 nt, synthetic construct
  source 1..19: mol_type = other RNA
acccagcattgcccaaact

SEQ ID NO: 5564 - RNA, 19 nt, synthetic construct
  source 1..19: mol_type = other RNA
cccagcattgcccaaacta

SEQ ID NO: 5565 - RNA, 19 nt, synthetic construct
  source 1..19: mol_type = other RNA
ccagcattgcccaaactat

SEQ ID NO: 5566 - RNA, 19 nt, synthetic construct
  source 1..19: mol_type = other RNA
cagcattgcccaaactatt

SEQ ID NO: 5567 - RNA, 19 nt, synthetic construct
  source 1..19: mol_type = other RNA
agcattgcccaaactattt

SEQ ID NO: 5568 - RNA, 19 nt, synthetic construct
  source 1..19: mol_type = other RNA
gcattgcccaaactatttt

SEQ ID NO: 5569 - RNA, 19 nt, synthetic construct
  source 1..19: mol_type = other RNA
cattgcccaaactattttg

SEQ ID NO: 5570 - RNA, 19 nt, synthetic construct
  source 1..19: mol_type = other RNA
attgcccaaactattttga

SEQ ID NO: 5571 - RNA, 19 nt, synthetic construct
  source 1..19: mol_type = other RNA
ttgcccaaactattttgac

SEQ ID NO: 5572 - RNA, 19 nt, synthetic construct
  source 1..19: mol_type = other RNA
tgcccaaactattttgaca

SEQ ID NO: 5573 - RNA, 19 nt, synthetic construct
  source 1..19: mol_type = other RNA
gcccaaactattttgacac

SEQ ID NO: 5574 - RNA, 19 nt, synthetic construct
  source 1..19: mol_type = other RNA
cccaaactattttgacacc

SEQ ID NO: 5575 - RNA, 19 nt, synthetic construct
  source 1..19: mol_type = other RNA
ccaaactattttgacacca

SEQ ID NO: 5576 - RNA, 19 nt, synthetic construct
  source 1..19: mol_type = other RNA
caaactattttgacaccag

SEQ ID NO: 5577 - RNA, 19 nt, synthetic construct
  source 1..19: mol_type = other RNA
aaactattttgacaccagg

SEQ ID NO: 5578 - RNA, 19 nt, synthetic construct
  source 1..19: mol_type = other RNA
aactattttgacaccagga

SEQ ID NO: 5579 - RNA, 19 nt, synthetic construct
  source 1..19: mol_type = other RNA
actattttgacaccaggac

SEQ ID NO: 5580 - RNA, 19 nt, synthetic construct
  source 1..19: mol_type = other RNA
ctattttgacaccaggacc

SEQ ID NO: 5581 - RNA, 19 nt, synthetic construct
  source 1..19: mol_type = other RNA
tattttgacaccaggacct

SEQ ID NO: 5582 - RNA, 19 nt, synthetic construct
  source 1..19: mol_type = other RNA
attttgacaccaggacctt

SEQ ID NO: 5583 - RNA, 19 nt, synthetic construct
  source 1..19: mol_type = other RNA
ttttgacaccaggaccttt

SEQ ID NO: 5584 - RNA, 19 nt, synthetic construct
  source 1..19: mol_type = other RNA
tttgacaccaggacctttt

SEQ ID NO: 5585 - RNA, 19 nt, synthetic construct
  source 1..19: mol_type = other RNA
ttgacaccaggaccttttt

SEQ ID NO: 5586 - RNA, 19 nt, synthetic construct
  source 1..19: mol_type = other RNA
tgacaccaggacctttttc

SEQ ID NO: 5587 - RNA, 19 nt, synthetic construct
  source 1..19: mol_type = other RNA
gacaccaggacctttttct

SEQ ID NO: 5588 - RNA, 19 nt, synthetic construct
  source 1..19: mol_type = other RNA
acaccaggacctttttctc

SEQ ID NO: 5589 - RNA, 19 nt, synthetic construct
  source 1..19: mol_type = other RNA
caccaggacctttttctcc

SEQ ID NO: 5590 - RNA, 19 nt, synthetic construct
  source 1..19: mol_type = other RNA
accaggacctttttctcct

SEQ ID NO: 5591 - RNA, 19 nt, synthetic construct
  source 1..19: mol_type = other RNA
ccaggacctttttctcctt

SEQ ID NO: 5592 - RNA, 19 nt, synthetic construct
  source 1..19: mol_type = other RNA
caggacctttttctccttt

SEQ ID NO: 5593 - RNA, 19 nt, synthetic construct
  source 1..19: mol_type = other RNA
aggacctttttctcctttg

SEQ ID NO: 5594 - RNA, 19 nt, synthetic construct
  source 1..19: mol_type = other RNA
ggacctttttctcctttgg

SEQ ID NO: 5595 - RNA, 19 nt, synthetic construct
  source 1..19: mol_type = other RNA
gacctttttctcctttggg

SEQ ID NO: 5596 - RNA, 19 nt, synthetic construct
  source 1..19: mol_type = other RNA
acctttttctcctttggga

SEQ ID NO: 5597 - RNA, 19 nt, synthetic construct
  source 1..19: mol_type = other RNA
cctttttctcctttgggat

SEQ ID NO: 5598 - RNA, 19 nt, synthetic construct
  source 1..19: mol_type = other RNA
ctttttctcctttgggata

SEQ ID NO: 5599 - RNA, 19 nt, synthetic construct
  source 1..19: mol_type = other RNA
tttttctcctttgggatac

SEQ ID NO: 5600 - RNA, 19 nt, synthetic construct
  source 1..19: mol_type = other RNA
ttttctcctttgggatact

SEQ ID NO: 5601 - RNA, 19 nt, synthetic construct
  source 1..19: mol_type = other RNA
tttctcctttgggatactt

SEQ ID NO: 5602 - RNA, 19 nt, synthetic construct
  source 1..19: mol_type = other RNA
ttctcctttgggatactta

SEQ ID NO: 5603 - RNA, 19 nt, synthetic construct
  source 1..19: mol_type = other RNA
tctcctttgggatacttat

SEQ ID NO: 5604 - RNA, 19 nt, synthetic construct
  source 1..19: mol_type = other RNA
ctcctttgggatacttatg

SEQ ID NO: 5605 - RNA, 19 nt, synthetic construct
  source 1..19: mol_type = other RNA
tcctttgggatacttatga

SEQ ID NO: 5606 - RNA, 19 nt, synthetic construct
  source 1..19: mol_type = other RNA
cctttgggatacttatgaa

SEQ ID NO: 5607 - RNA, 19 nt, synthetic construct
  source 1..19: mol_type = other RNA
ctttgggatacttatgaac

SEQ ID NO: 5608 - RNA, 19 nt, synthetic construct
  source 1..19: mol_type = other RNA
tttgggatacttatgaacc

SEQ ID NO: 5609 - RNA, 19 nt, synthetic construct
  source 1..19: mol_type = other RNA
ttgggatacttatgaacct

SEQ ID NO: 5610 - RNA, 19 nt, synthetic construct
  source 1..19: mol_type = other RNA
tgggatacttatgaacctc

SEQ ID NO: 5611 - RNA, 19 nt, synthetic construct
  source 1..19: mol_type = other RNA
gggatacttatgaacctct

SEQ ID NO: 5612 - RNA, 19 nt, synthetic construct
  source 1..19: mol_type = other RNA
ggatacttatgaacctctc

SEQ ID NO: 5613 - RNA, 19 nt, synthetic construct
  source 1..19: mol_type = other RNA
gatacttatgaacctctca

SEQ ID NO: 5614 - RNA, 19 nt, synthetic construct
  source 1..19: mol_type = other RNA
atacttatgaacctctcac

SEQ ID NO: 5615 - RNA, 19 nt, synthetic construct
  source 1..19: mol_type = other RNA
tacttatgaacctctcact

SEQ ID NO: 5616 - RNA, 19 nt, synthetic construct
  source 1..19: mol_type = other RNA
acttatgaacctctcacta

SEQ ID NO: 5617 - RNA, 19 nt, synthetic construct
  source 1..19: mol_type = other RNA
cttatgaacctctcactaa

SEQ ID NO: 5618 - RNA, 19 nt, synthetic construct
  source 1..19: mol_type = other RNA
ttatgaacctctcactaat

SEQ ID NO: 5619 - RNA, 19 nt, synthetic construct
  source 1..19: mol_type = other RNA
tatgaacctctcactaatg

SEQ ID NO: 5620 - RNA, 19 nt, synthetic construct
  source 1..19: mol_type = other RNA
atgaacctctcactaatgt

SEQ ID NO: 5621 - RNA, 19 nt, synthetic construct
  source 1..19: mol_type = other RNA
tgaacctctcactaatgtc

SEQ ID NO: 5622 - RNA, 19 nt, synthetic construct
  source 1..19: mol_type = other RNA
gaacctctcactaatgtcc

SEQ ID NO: 5623 - RNA, 19 nt, synthetic construct
  source 1..19: mol_type = other RNA
aacctctcactaatgtcct

SEQ ID NO: 5624 - RNA, 19 nt, synthetic construct
  source 1..19: mol_type = other RNA
acctctcactaatgtcctg

SEQ ID NO: 5625 - RNA, 19 nt, synthetic construct
  source 1..19: mol_type = other RNA
cctctcactaatgtcctgt

SEQ ID NO: 5626 - RNA, 19 nt, synthetic construct
  source 1..19: mol_type = other RNA
ctctcactaatgtcctgtg

SEQ ID NO: 5627 - RNA, 19 nt, synthetic construct
  source 1..19: mol_type = other RNA
tctcactaatgtcctgtgg

SEQ ID NO: 5628 - RNA, 19 nt, synthetic construct
  source 1..19: mol_type = other RNA
ctcactaatgtcctgtgga

SEQ ID NO: 5629 - RNA, 19 nt, synthetic construct
  source 1..19: mol_type = other RNA
tcactaatgtcctgtggag

SEQ ID NO: 5630 - RNA, 19 nt, synthetic construct
  source 1..19: mol_type = other RNA
cactaatgtcctgtggaga

SEQ ID NO: 5631 - RNA, 19 nt, synthetic construct
  source 1..19: mol_type = other RNA
actaatgtcctgtggagaa

SEQ ID NO: 5632 - RNA, 19 nt, synthetic construct
  source 1..19: mol_type = other RNA
ctaatgtcctgtggagaac

SEQ ID NO: 5633 - RNA, 19 nt, synthetic construct
  source 1..19: mol_type = other RNA
taatgtcctgtggagaaca

SEQ ID NO: 5634 - RNA, 19 nt, synthetic construct
  source 1..19: mol_type = other RNA
aatgtcctgtggagaacat

SEQ ID NO: 5635 - RNA, 19 nt, synthetic construct
  source 1..19: mol_type = other RNA
atgtcctgtggagaacatt

SEQ ID NO: 5636 - RNA, 19 nt, synthetic construct
  source 1..19: mol_type = other RNA
tgtcctgtggagaacattt

SEQ ID NO: 5637 - RNA, 19 nt, synthetic construct
  source 1..19: mol_type = other RNA
gtcctgtggagaacatttt

SEQ ID NO: 5638 - RNA, 19 nt, synthetic construct
  source 1..19: mol_type = other RNA
tcctgtggagaacattttg

SEQ ID NO: 5639 - RNA, 19 nt, synthetic construct
  source 1..19: mol_type = other RNA
cctgtggagaacattttgg

SEQ ID NO: 5640 - RNA, 19 nt, synthetic construct
  source 1..19: mol_type = other RNA
ctgtggagaacattttggg

SEQ ID NO: 5641 - RNA, 19 nt, synthetic construct
  source 1..19: mol_type = other RNA
tgtggagaacattttggga

SEQ ID NO: 5642 - RNA, 19 nt, synthetic construct
  source 1..19: mol_type = other RNA
gtggagaacattttgggaa

SEQ ID NO: 5643 - RNA, 19 nt, synthetic construct
  source 1..19: mol_type = other RNA
tggagaacattttgggaaa

SEQ ID NO: 5644 - RNA, 19 nt, synthetic construct
  source 1..19: mol_type = other RNA
ggagaacattttgggaaac

SEQ ID NO: 5645 - RNA, 19 nt, synthetic construct
  source 1..19: mol_type = other RNA
gagaacattttgggaaaca

SEQ ID NO: 5646 - RNA, 19 nt, synthetic construct
  source 1..19: mol_type = other RNA
agaacattttgggaaacac

SEQ ID NO: 5647 - RNA, 19 nt, synthetic construct
  source 1..19: mol_type = other RNA
gaacattttgggaaacact

SEQ ID NO: 5648 - RNA, 19 nt, synthetic construct
  source 1..19: mol_type = other RNA
aacattttgggaaacacta

SEQ ID NO: 5649 - RNA, 19 nt, synthetic construct
  source 1..19: mol_type = other RNA
acattttgggaaacactat

SEQ ID NO: 5650 - RNA, 19 nt, synthetic construct
  source 1..19: mol_type = other RNA
cattttgggaaacactatg

SEQ ID NO: 5651 - RNA, 19 nt, synthetic construct
  source 1..19: mol_type = other RNA
attttgggaaacactatgt

SEQ ID NO: 5652 - RNA, 19 nt, synthetic construct
  source 1..19: mol_type = other RNA
ttttgggaaacactatgtt

SEQ ID NO: 5653 - RNA, 19 nt, synthetic construct
  source 1..19: mol_type = other RNA
tttgggaaacactatgtta

SEQ ID NO: 5654 - RNA, 19 nt, synthetic construct
  source 1..19: mol_type = other RNA
ttgggaaacactatgttag

SEQ ID NO: 5655 - RNA, 19 nt, synthetic construct
  source 1..19: mol_type = other RNA
tgggaaacactatgttaga

SEQ ID NO: 5656 - RNA, 19 nt, synthetic construct
  source 1..19: mol_type = other RNA
gggaaacactatgttagat

SEQ ID NO: 5657 - RNA, 19 nt, synthetic construct
  source 1..19: mol_type = other RNA
ggaaacactatgttagata

SEQ ID NO: 5658 - RNA, 19 nt, synthetic construct
  source 1..19: mol_type = other RNA
gaaacactatgttagatag

SEQ ID NO: 5659 - RNA, 19 nt, synthetic construct
  source 1..19: mol_type = other RNA
aaacactatgttagatagt

SEQ ID NO: 5660 - RNA, 19 nt, synthetic construct
  source 1..19: mol_type = other RNA
aacactatgttagatagtt

SEQ ID NO: 5661 - RNA, 19 nt, synthetic construct
  source 1..19: mol_type = other RNA
acactatgttagatagttc

SEQ ID NO: 5662 - RNA, 19 nt, synthetic construct
  source 1..19: mol_type = other RNA
cactatgttagatagttct

SEQ ID NO: 5663 - RNA, 19 nt, synthetic construct
  source 1..19: mol_type = other RNA
actatgttagatagttctt

SEQ ID NO: 5664 - RNA, 19 nt, synthetic construct
  source 1..19: mol_type = other RNA
ctatgttagatagttcttt

SEQ ID NO: 5665 - RNA, 19 nt, synthetic construct
  source 1..19: mol_type = other RNA
tatgttagatagttcttta

SEQ ID NO: 5666 - RNA, 19 nt, synthetic construct
  source 1..19: mol_type = other RNA
atgttagatagttctttaa

SEQ ID NO: 5667 - RNA, 19 nt, synthetic construct
  source 1..19: mol_type = other RNA
tgttagatagttctttaag

SEQ ID NO: 5668 - RNA, 19 nt, synthetic construct
  source 1..19: mol_type = other RNA
gttagatagttctttaagg

SEQ ID NO: 5669 - RNA, 19 nt, synthetic construct
  source 1..19: mol_type = other RNA
ttagatagttctttaagga

SEQ ID NO: 5670 - RNA, 19 nt, synthetic construct
  source 1..19: mol_type = other RNA
tagatagttctttaaggag

SEQ ID NO: 5671 - RNA, 19 nt, synthetic construct
  source 1..19: mol_type = other RNA
agatagttctttaaggaga

SEQ ID NO: 5672 - RNA, 19 nt, synthetic construct
  source 1..19: mol_type = other RNA
gatagttctttaaggagac

SEQ ID NO: 5673 - RNA, 19 nt, synthetic construct
  source 1..19: mol_type = other RNA
atagttctttaaggagaca

SEQ ID NO: 5674 - RNA, 19 nt, synthetic construct
  source 1..19: mol_type = other RNA
tagttctttaaggagacaa

SEQ ID NO: 5675 - RNA, 19 nt, synthetic construct
  source 1..19: mol_type = other RNA
agttctttaaggagacaaa

SEQ ID NO: 5676 - RNA, 19 nt, synthetic construct
  source 1..19: mol_type = other RNA
gttctttaaggagacaaaa

SEQ ID NO: 5677 - RNA, 19 nt, synthetic construct
  source 1..19: mol_type = other RNA
ttctttaaggagacaaaac

SEQ ID NO: 5678 - RNA, 19 nt, synthetic construct
  source 1..19: mol_type = other RNA
tctttaaggagacaaaacg

SEQ ID NO: 5679 - RNA, 19 nt, synthetic construct
  source 1..19: mol_type = other RNA
ctttaaggagacaaaacgg

SEQ ID NO: 5680 - RNA, 19 nt, synthetic construct
  source 1..19: mol_type = other RNA
tttaaggagacaaaacggt

SEQ ID NO: 5681 - RNA, 19 nt, synthetic construct
  source 1..19: mol_type = other RNA
ttaaggagacaaaacggta

SEQ ID NO: 5682 - RNA, 19 nt, synthetic construct
  source 1..19: mol_type = other RNA
taaggagacaaaacggtaa

SEQ ID NO: 5683 - RNA, 19 nt, synthetic construct
  source 1..19: mol_type = other RNA
aaggagacaaaacggtaat

SEQ ID NO: 5684 - RNA, 19 nt, synthetic construct
  source 1..19: mol_type = other RNA
aggagacaaaacggtaatg

SEQ ID NO: 5685 - RNA, 19 nt, synthetic construct
  source 1..19: mol_type = other RNA
ggagacaaaacggtaatga

SEQ ID NO: 5686 - RNA, 19 nt, synthetic construct
  source 1..19: mol_type = other RNA
gagacaaaacggtaatgaa

SEQ ID NO: 5687 - RNA, 19 nt, synthetic construct
  source 1..19: mol_type = other RNA
agacaaaacggtaatgaac

SEQ ID NO: 5688 - RNA, 19 nt, synthetic construct
  source 1..19: mol_type = other RNA
gacaaaacggtaatgaaca

SEQ ID NO: 5689 - RNA, 19 nt, synthetic construct
  source 1..19: mol_type = other RNA
acaaaacggtaatgaacag

SEQ ID NO: 5690 - RNA, 19 nt, synthetic construct
  source 1..19: mol_type = other RNA
caaaacggtaatgaacaga

SEQ ID NO: 5691 - RNA, 19 nt, synthetic construct
  source 1..19: mol_type = other RNA
aaaacggtaatgaacagat

SEQ ID NO: 5692 - RNA, 19 nt, synthetic construct
  source 1..19: mol_type = other RNA
aaacggtaatgaacagata

SEQ ID NO: 5693 - RNA, 19 nt, synthetic construct
  source 1..19: mol_type = other RNA
aacggtaatgaacagatag

SEQ ID NO: 5694 - RNA, 19 nt, synthetic construct
  source 1..19: mol_type = other RNA
acggtaatgaacagatagc

SEQ ID NO: 5695 - RNA, 19 nt, synthetic construct
  source 1..19: mol_type = other RNA
cggtaatgaacagatagca

SEQ ID NO: 5696 - RNA, 19 nt, synthetic construct
  source 1..19: mol_type = other RNA
ggtaatgaacagatagcac

SEQ ID NO: 5697 - RNA, 19 nt, synthetic construct
  source 1..19: mol_type = other RNA
gtaatgaacagatagcact

SEQ ID NO: 5698 - RNA, 19 nt, synthetic construct
  source 1..19: mol_type = other RNA
taatgaacagatagcactg

SEQ ID NO: 5699 - RNA, 19 nt, synthetic construct
  source 1..19: mol_type = other RNA
aatgaacagatagcactgg

SEQ ID NO: 5700 - RNA, 19 nt, synthetic construct
  source 1..19: mol_type = other RNA
atgaacagatagcactggg

SEQ ID NO: 5701 - RNA, 19 nt, synthetic construct
  source 1..19: mol_type = other RNA
tgaacagatagcactgggg

SEQ ID NO: 5702 - RNA, 19 nt, synthetic construct
  source 1..19: mol_type = other RNA
gaacagatagcactggggc

SEQ ID NO: 5703 - RNA, 19 nt, synthetic construct
  source 1..19: mol_type = other RNA
aacagatagcactggggca

SEQ ID NO: 5704 - RNA, 19 nt, synthetic construct
  source 1..19: mol_type = other RNA
acagatagcactggggcag

SEQ ID NO: 5705 - RNA, 19 nt, synthetic construct
  source 1..19: mol_type = other RNA
cagatagcactggggcaga

SEQ ID NO: 5706 - RNA, 19 nt, synthetic construct
  source 1..19: mol_type = other RNA
agatagcactggggcagaa

SEQ ID NO: 5707 - RNA, 19 nt, synthetic construct
  source 1..19: mol_type = other RNA
gatagcactggggcagaat

SEQ ID NO: 5708 - RNA, 19 nt, synthetic construct
  source 1..19: mol_type = other RNA
atagcactggggcagaata

SEQ ID NO: 5709 - RNA, 19 nt, synthetic construct
  source 1..19: mol_type = other RNA
tagcactggggcagaatat

SEQ ID NO: 5710 - RNA, 19 nt, synthetic construct
  source 1..19: mol_type = other RNA
agcactggggcagaatatg

SEQ ID NO: 5711 - RNA, 19 nt, synthetic construct
  source 1..19: mol_type = other RNA
gcactggggcagaatatgc

SEQ ID NO: 5712 - RNA, 19 nt, synthetic construct
  source 1..19: mol_type = other RNA
cactggggcagaatatgca

SEQ ID NO: 5713 - RNA, 19 nt, synthetic construct
  source 1..19: mol_type = other RNA
actggggcagaatatgcat

SEQ ID NO: 5714 - RNA, 19 nt, synthetic construct
  source 1..19: mol_type = other RNA
ctggggcagaatatgcatg

SEQ ID NO: 5715 - RNA, 19 nt, synthetic construct
  source 1..19: mol_type = other RNA
tggggcagaatatgcatgc

SEQ ID NO: 5716 - RNA, 19 nt, synthetic construct
  source 1..19: mol_type = other RNA
ggggcagaatatgcatgca

SEQ ID NO: 5717 - RNA, 19 nt, synthetic construct
  source 1..19: mol_type = other RNA
gggcagaatatgcatgcat

SEQ ID NO: 5718 - RNA, 19 nt, synthetic construct
  source 1..19: mol_type = other RNA
ggcagaatatgcatgcatt

SEQ ID NO: 5719 - RNA, 19 nt, synthetic construct
  source 1..19: mol_type = other RNA
gcagaatatgcatgcattt

SEQ ID NO: 5720 - RNA, 19 nt, synthetic construct
  source 1..19: mol_type = other RNA
cagaatatgcatgcatttt

SEQ ID NO: 5721 - RNA, 19 nt, synthetic construct
  source 1..19: mol_type = other RNA
agaatatgcatgcattttg

SEQ ID NO: 5722 - RNA, 19 nt, synthetic construct
  source 1..19: mol_type = other RNA
gaatatgcatgcattttgt

SEQ ID NO: 5723 - RNA, 19 nt, synthetic construct
  source 1..19: mol_type = other RNA
aatatgcatgcattttgta

SEQ ID NO: 5724 - RNA, 19 nt, synthetic construct
  source 1..19: mol_type = other RNA
atatgcatgcattttgtaa

SEQ ID NO: 5725 - RNA, 19 nt, synthetic construct
  source 1..19: mol_type = other RNA
tatgcatgcattttgtaac

SEQ ID NO: 5726 - RNA, 19 nt, synthetic construct
  source 1..19: mol_type = other RNA
atgcatgcattttgtaacg

SEQ ID NO: 5727 - RNA, 19 nt, synthetic construct
  source 1..19: mol_type = other RNA
tgcatgcattttgtaacgt

SEQ ID NO: 5728 - RNA, 19 nt, synthetic construct
  source 1..19: mol_type = other RNA
gcatgcattttgtaacgtc

SEQ ID NO: 5729 - RNA, 19 nt, synthetic construct
  source 1..19: mol_type = other RNA
catgcattttgtaacgtcc

SEQ ID NO: 5730 - RNA, 19 nt, synthetic construct
  source 1..19: mol_type = other RNA
atgcattttgtaacgtcca

SEQ ID NO: 5731 - RNA, 19 nt, synthetic construct
  source 1..19: mol_type = other RNA
tgcattttgtaacgtccag

SEQ ID NO: 5732 - RNA, 19 nt, synthetic construct
  source 1..19: mol_type = other RNA
gcattttgtaacgtccagt

SEQ ID NO: 5733 - RNA, 19 nt, synthetic construct
  source 1..19: mol_type = other RNA
cattttgtaacgtccagtg

SEQ ID NO: 5734 - RNA, 19 nt, synthetic construct
  source 1..19: mol_type = other RNA
attttgtaacgtccagtgt

SEQ ID NO: 5735 - RNA, 19 nt, synthetic construct
  source 1..19: mol_type = other RNA
ttttgtaacgtccagtgtg

SEQ ID NO: 5736 - RNA, 19 nt, synthetic construct
  source 1..19: mol_type = other RNA
tttgtaacgtccagtgtgg

SEQ ID NO: 5737 - RNA, 19 nt, synthetic construct
  source 1..19: mol_type = other RNA
ttgtaacgtccagtgtggc

SEQ ID NO: 5738 - RNA, 19 nt, synthetic construct
  source 1..19: mol_type = other RNA
tgtaacgtccagtgtggcg

SEQ ID NO: 5739 - RNA, 19 nt, synthetic construct
  source 1..19: mol_type = other RNA
gtaacgtccagtgtggcgt

SEQ ID NO: 5740 - RNA, 19 nt, synthetic construct
  source 1..19: mol_type = other RNA
taacgtccagtgtggcgtt

SEQ ID NO: 5741 - RNA, 19 nt, synthetic construct
  source 1..19: mol_type = other RNA
aacgtccagtgtggcgttg

SEQ ID NO: 5742 - RNA, 19 nt, synthetic construct
  source 1..19: mol_type = other RNA
acgtccagtgtggcgttga

SEQ ID NO: 5743 - RNA, 19 nt, synthetic construct
  source 1..19: mol_type = other RNA
cgtccagtgtggcgttgaa

SEQ ID NO: 5744 - RNA, 19 nt, synthetic construct
  source 1..19: mol_type = other RNA
gtccagtgtggcgttgaat

SEQ ID NO: 5745 - RNA, 19 nt, synthetic construct
  source 1..19: mol_type = other RNA
tccagtgtggcgttgaata

SEQ ID NO: 5746 - RNA, 19 nt, synthetic construct
  source 1..19: mol_type = other RNA
ccagtgtggcgttgaatag

SEQ ID NO: 5747 - RNA, 19 nt, synthetic construct
  source 1..19: mol_type = other RNA
cagtgtggcgttgaataga

SEQ ID NO: 5748 - RNA, 19 nt, synthetic construct
  source 1..19: mol_type = other RNA
agtgtggcgttgaatagat

SEQ ID NO: 5749 - RNA, 19 nt, synthetic construct
  source 1..19: mol_type = other RNA
gtgtggcgttgaatagatg

SEQ ID NO: 5750 - RNA, 19 nt, synthetic construct
  source 1..19: mol_type = other RNA
tgtggcgttgaatagatgt

SEQ ID NO: 5751 - RNA, 19 nt, synthetic construct
  source 1..19: mol_type = other RNA
gtggcgttgaatagatgtg

SEQ ID NO: 5752 - RNA, 19 nt, synthetic construct
  source 1..19: mol_type = other RNA
tggcgttgaatagatgtgt

SEQ ID NO: 5753 - RNA, 19 nt, synthetic construct
  source 1..19: mol_type = other RNA
ggcgttgaatagatgtgta

SEQ ID NO: 5754 - RNA, 19 nt, synthetic construct
  source 1..19: mol_type = other RNA
gcgttgaatagatgtgtat

SEQ ID NO: 5755 - RNA, 19 nt, synthetic construct
  source 1..19: mol_type = other RNA
cgttgaatagatgtgtatt

SEQ ID NO: 5756 - RNA, 19 nt, synthetic construct
  source 1..19: mol_type = other RNA
gttgaatagatgtgtattt

SEQ ID NO: 5757 - RNA, 19 nt, synthetic construct
  source 1..19: mol_type = other RNA
ttgaatagatgtgtatttc

SEQ ID NO: 5758 - RNA, 19 nt, synthetic construct
  source 1..19: mol_type = other RNA
tgaatagatgtgtatttcc

SEQ ID NO: 5759 - RNA, 19 nt, synthetic construct
  source 1..19: mol_type = other RNA
gaatagatgtgtatttcct

SEQ ID NO: 5760 - RNA, 19 nt, synthetic construct
  source 1..19: mol_type = other RNA
aatagatgtgtatttcctc

SEQ ID NO: 5761 - RNA, 19 nt, synthetic construct
  source 1..19: mol_type = other RNA
atagatgtgtatttcctcc

SEQ ID NO: 5762 - RNA, 19 nt, synthetic construct
  source 1..19: mol_type = other RNA
tagatgtgtatttcctccc

SEQ ID NO: 5763 - RNA, 19 nt, synthetic construct
  source 1..19: mol_type = other RNA
agatgtgtatttcctcccc

SEQ ID NO: 5764 - RNA, 19 nt, synthetic construct
  source 1..19: mol_type = other RNA
gatgtgtatttcctcccct

SEQ ID NO: 5765 - RNA, 19 nt, synthetic construct
  source 1..19: mol_type = other RNA
atgtgtatttcctcccctg

SEQ ID NO: 5766 - RNA, 19 nt, synthetic construct
  source 1..19: mol_type = other RNA
tgtgtatttcctcccctgc

SEQ ID NO: 5767 - RNA, 19 nt, synthetic construct
  source 1..19: mol_type = other RNA
gtgtatttcctcccctgca

SEQ ID NO: 5768 - RNA, 19 nt, synthetic construct
  source 1..19: mol_type = other RNA
tgtatttcctcccctgcag

SEQ ID NO: 5769 - RNA, 19 nt, synthetic construct
  source 1..19: mol_type = other RNA
gtatttcctcccctgcaga

SEQ ID NO: 5770 - RNA, 19 nt, synthetic construct
  source 1..19: mol_type = other RNA
tatttcctcccctgcagaa

SEQ ID NO: 5771 - RNA, 19 nt, synthetic construct
  source 1..19: mol_type = other RNA
atttcctcccctgcagaaa

SEQ ID NO: 5772 - RNA, 19 nt, synthetic construct
  source 1..19: mol_type = other RNA
tttcctcccctgcagaaaa

SEQ ID NO: 5773 - RNA, 19 nt, synthetic construct
  source 1..19: mol_type = other RNA
ttcctcccctgcagaaaat

SEQ ID NO: 5774 - RNA, 19 nt, synthetic construct
  source 1..19: mol_type = other RNA
tcctcccctgcagaaaata

SEQ ID NO: 5775 - RNA, 19 nt, synthetic construct
  source 1..19: mol_type = other RNA
cctcccctgcagaaaataa

SEQ ID NO: 5776 - RNA, 19 nt, synthetic construct
  source 1..19: mol_type = other RNA
ctcccctgcagaaaataag

SEQ ID NO: 5777 - RNA, 19 nt, synthetic construct
  source 1..19: mol_type = other RNA
tcccctgcagaaaataagc

SEQ ID NO: 5778 - RNA, 19 nt, synthetic construct
  source 1..19: mol_type = other RNA
cccctgcagaaaataagca

SEQ ID NO: 5779 - RNA, 19 nt, synthetic construct
  source 1..19: mol_type = other RNA
ccctgcagaaaataagcac

SEQ ID NO: 5780 - RNA, 19 nt, synthetic construct
  source 1..19: mol_type = other RNA
cctgcagaaaataagcaca

SEQ ID NO: 5781 - RNA, 19 nt, synthetic construct
  source 1..19: mol_type = other RNA
ctgcagaaaataagcacag

SEQ ID NO: 5782 - RNA, 19 nt, synthetic construct
  source 1..19: mol_type = other RNA
tgcagaaaataagcacaga

SEQ ID NO: 5783 - RNA, 19 nt, synthetic construct
  source 1..19: mol_type = other RNA
gcagaaaataagcacagaa

SEQ ID NO: 5784 - RNA, 19 nt, synthetic construct
  source 1..19: mol_type = other RNA
cagaaaataagcacagaaa

SEQ ID NO: 5785 - RNA, 19 nt, synthetic construct
  source 1..19: mol_type = other RNA
agaaaataagcacagaaaa

SEQ ID NO: 5786 - RNA, 19 nt, synthetic construct
  source 1..19: mol_type = other RNA
gaaaataagcacagaaaat

SEQ ID NO: 5787 - RNA, 19 nt, synthetic construct
  source 1..19: mol_type = other RNA
aaaataagcacagaaaatt

SEQ ID NO: 5788 - RNA, 19 nt, synthetic construct
  source 1..19: mol_type = other RNA
aaataagcacagaaaatta

SEQ ID NO: 5789 - RNA, 19 nt, synthetic construct
  source 1..19: mol_type = other RNA
aataagcacagaaaattat

SEQ ID NO: 5790 - RNA, 19 nt, synthetic construct
  source 1..19: mol_type = other RNA
ataagcacagaaaattata

SEQ ID NO: 5791 - RNA, 19 nt, synthetic construct
  source 1..19: mol_type = other RNA
taagcacagaaaattataa

SEQ ID NO: 5792 - RNA, 19 nt, synthetic construct
  source 1..19: mol_type = other RNA
aagcacagaaaattataat

SEQ ID NO: 5793 - RNA, 19 nt, synthetic construct
  source 1..19: mol_type = other RNA
agcacagaaaattataatg

SEQ ID NO: 5794 - RNA, 19 nt, synthetic construct
  source 1..19: mol_type = other RNA
gcacagaaaattataatgt

SEQ ID NO: 5795 - RNA, 19 nt, synthetic construct
  source 1..19: mol_type = other RNA
cacagaaaattataatgta

SEQ ID NO: 5796 - RNA, 19 nt, synthetic construct
  source 1..19: mol_type = other RNA
acagaaaattataatgtag

SEQ ID NO: 5797 - RNA, 19 nt, synthetic construct
  source 1..19: mol_type = other RNA
cagaaaattataatgtagg

SEQ ID NO: 5798 - RNA, 19 nt, synthetic construct
  source 1..19: mol_type = other RNA
agaaaattataatgtaggt

SEQ ID NO: 5799 - RNA, 19 nt, synthetic construct
  source 1..19: mol_type = other RNA
gaaaattataatgtaggtg

SEQ ID NO: 5800 - RNA, 19 nt, synthetic construct
  source 1..19: mol_type = other RNA
aaaattataatgtaggtga

SEQ ID NO: 5801 - RNA, 19 nt, synthetic construct
  source 1..19: mol_type = other RNA
aaattataatgtaggtgat

SEQ ID NO: 5802 - RNA, 19 nt, synthetic construct
  source 1..19: mol_type = other RNA
aattataatgtaggtgatc

SEQ ID NO: 5803 - RNA, 19 nt, synthetic construct
  source 1..19: mol_type = other RNA
attataatgtaggtgatcg

SEQ ID NO: 5804 - RNA, 19 nt, synthetic construct
  source 1..19: mol_type = other RNA
ttataatgtaggtgatcgg

SEQ ID NO: 5805 - RNA, 19 nt, synthetic construct
  source 1..19: mol_type = other RNA
tataatgtaggtgatcgga

SEQ ID NO: 5806 - RNA, 19 nt, synthetic construct
  source 1..19: mol_type = other RNA
ataatgtaggtgatcggag

SEQ ID NO: 5807 - RNA, 19 nt, synthetic construct
  source 1..19: mol_type = other RNA
taatgtaggtgatcggagc

SEQ ID NO: 5808 - RNA, 19 nt, synthetic construct
  source 1..19: mol_type = other RNA
aatgtaggtgatcggagct

SEQ ID NO: 5809 - RNA, 19 nt, synthetic construct
  source 1..19: mol_type = other RNA
atgtaggtgatcggagctc

SEQ ID NO: 5810 - RNA, 19 nt, synthetic construct
  source 1..19: mol_type = other RNA
tgtaggtgatcggagctct

SEQ ID NO: 5811 - RNA, 19 nt, synthetic construct
  source 1..19: mol_type = other RNA
gtaggtgatcggagctctt

SEQ ID NO: 5812 - RNA, 19 nt, synthetic construct
  source 1..19: mol_type = other RNA
taggtgatcggagctcttt

SEQ ID NO: 5813 - RNA, 19 nt, synthetic construct
  source 1..19: mol_type = other RNA
aggtgatcggagctctttc

SEQ ID NO: 5814 - RNA, 19 nt, synthetic construct
  source 1..19: mol_type = other RNA
ggtgatcggagctctttcc

SEQ ID NO: 5815 - RNA, 19 nt, synthetic construct
  source 1..19: mol_type = other RNA
gtgatcggagctctttcct

SEQ ID NO: 5816 - RNA, 19 nt, synthetic construct
  source 1..19: mol_type = other RNA
tgatcggagctctttcctt

SEQ ID NO: 5817 - RNA, 19 nt, synthetic construct
  source 1..19: mol_type = other RNA
gatcggagctctttccttt

SEQ ID NO: 5818 - RNA, 19 nt, synthetic construct
  source 1..19: mol_type = other RNA
atcggagctctttcctttg

SEQ ID NO: 5819 - RNA, 19 nt, synthetic construct
  source 1..19: mol_type = other RNA
tcggagctctttcctttga

SEQ ID NO: 5820 - RNA, 19 nt, synthetic construct
  source 1..19: mol_type = other RNA
cggagctctttcctttgat

SEQ ID NO: 5821 - RNA, 19 nt, synthetic construct
  source 1..19: mol_type = other RNA
ggagctctttcctttgata

SEQ ID NO: 5822 - RNA, 19 nt, synthetic construct
  source 1..19: mol_type = other RNA
gagctctttcctttgatag

SEQ ID NO: 5823 - RNA, 19 nt, synthetic construct
  source 1..19: mol_type = other RNA
agctctttcctttgataga

SEQ ID NO: 5824 - RNA, 19 nt, synthetic construct
  source 1..19: mol_type = other RNA
gctctttcctttgatagag

SEQ ID NO: 5825 - RNA, 19 nt, synthetic construct
  source 1..19: mol_type = other RNA
ctctttcctttgatagaga

SEQ ID NO: 5826 - RNA, 19 nt, synthetic construct
  source 1..19: mol_type = other RNA
tctttcctttgatagagag

SEQ ID NO: 5827 - RNA, 19 nt, synthetic construct
  source 1..19: mol_type = other RNA
ctttcctttgatagagaga

SEQ ID NO: 5828 - RNA, 19 nt, synthetic construct
  source 1..19: mol_type = other RNA
tttcctttgatagagagaa

SEQ ID NO: 5829 - RNA, 19 nt, synthetic construct
  source 1..19: mol_type = other RNA
ttcctttgatagagagaac

SEQ ID NO: 5830 - RNA, 19 nt, synthetic construct
  source 1..19: mol_type = other RNA
tcctttgatagagagaaca

SEQ ID NO: 5831 - RNA, 19 nt, synthetic construct
  source 1..19: mol_type = other RNA
cctttgatagagagaacag

SEQ ID NO: 5832 - RNA, 19 nt, synthetic construct
  source 1..19: mol_type = other RNA
ctttgatagagagaacagc

SEQ ID NO: 5833 - RNA, 19 nt, synthetic construct
  source 1..19: mol_type = other RNA
tttgatagagagaacagcc

SEQ ID NO: 5834 - RNA, 19 nt, synthetic construct
  source 1..19: mol_type = other RNA
ttgatagagagaacagccc

SEQ ID NO: 5835 - RNA, 19 nt, synthetic construct
  source 1..19: mol_type = other RNA
tgatagagagaacagcccc

SEQ ID NO: 5836 - RNA, 19 nt, synthetic construct
  source 1..19: mol_type = other RNA
gatagagagaacagcccca

SEQ ID NO: 5837 - RNA, 19 nt, synthetic construct
  source 1..19: mol_type = other RNA
atagagagaacagccccaa

SEQ ID NO: 5838 - RNA, 19 nt, synthetic construct
  source 1..19: mol_type = other RNA
tagagagaacagccccaat

SEQ ID NO: 5839 - RNA, 19 nt, synthetic construct
  source 1..19: mol_type = other RNA
agagagaacagccccaatg

SEQ ID NO: 5840 - RNA, 19 nt, synthetic construct
  source 1..19: mol_type = other RNA
gagagaacagccccaatga

SEQ ID NO: 5841 - RNA, 19 nt, synthetic construct
  source 1..19: mol_type = other RNA
agagaacagccccaatgat

SEQ ID NO: 5842 - RNA, 19 nt, synthetic construct
  source 1..19: mol_type = other RNA
gagaacagccccaatgatc

SEQ ID NO: 5843 - RNA, 19 nt, synthetic construct
  source 1..19: mol_type = other RNA
agaacagccccaatgatcc

SEQ ID NO: 5844 - RNA, 19 nt, synthetic construct
  source 1..19: mol_type = other RNA
gaacagccccaatgatcct

SEQ ID NO: 5845 - RNA, 19 nt, synthetic construct
  source 1..19: mol_type = other RNA
aacagccccaatgatcctg

SEQ ID NO: 5846 - RNA, 19 nt, synthetic construct
  source 1..19: mol_type = other RNA
acagccccaatgatcctgg

SEQ ID NO: 5847 - RNA, 19 nt, synthetic construct
  source 1..19: mol_type = other RNA
cagccccaatgatcctggc

SEQ ID NO: 5848 - RNA, 19 nt, synthetic construct
  source 1..19: mol_type = other RNA
agccccaatgatcctggct

SEQ ID NO: 5849 - RNA, 19 nt, synthetic construct
  source 1..19: mol_type = other RNA
gccccaatgatcctggctt

SEQ ID NO: 5850 - RNA, 19 nt, synthetic construct
  source 1..19: mol_type = other RNA
ccccaatgatcctggcttt

SEQ ID NO: 5851 - RNA, 19 nt, synthetic construct
  source 1..19: mol_type = other RNA
cccaatgatcctggctttt

SEQ ID NO: 5852 - RNA, 19 nt, synthetic construct
  source 1..19: mol_type = other RNA
ccaatgatcctggcttttt

SEQ ID NO: 5853 - RNA, 19 nt, synthetic construct
  source 1..19: mol_type = other RNA
caatgatcctggctttttc

SEQ ID NO: 5854 - RNA, 19 nt, synthetic construct
  source 1..19: mol_type = other RNA
aatgatcctggctttttca

SEQ ID NO: 5855 - RNA, 19 nt, synthetic construct
  source 1..19: mol_type = other RNA
atgatcctggctttttcac

SEQ ID NO: 5856 - RNA, 19 nt, synthetic construct
  source 1..19: mol_type = other RNA
tgatcctggctttttcact

SEQ ID NO: 5857 - RNA, 19 nt, synthetic construct
  source 1..19: mol_type = other RNA
gatcctggctttttcactg

SEQ ID NO: 5858 - RNA, 19 nt, synthetic construct
  source 1..19: mol_type = other RNA
atcctggctttttcactga

SEQ ID NO: 5859 - RNA, 19 nt, synthetic construct
  source 1..19: mol_type = other RNA
tcctggctttttcactgaa

SEQ ID NO: 5860 - RNA, 19 nt, synthetic construct
  source 1..19: mol_type = other RNA
cctggctttttcactgaac

SEQ ID NO: 5861 - RNA, 19 nt, synthetic construct
  source 1..19: mol_type = other RNA
ctggctttttcactgaacg

SEQ ID NO: 5862 - RNA, 19 nt, synthetic construct
  source 1..19: mol_type = other RNA
tggctttttcactgaacgt

SEQ ID NO: 5863 - RNA, 19 nt, synthetic construct
  source 1..19: mol_type = other RNA
ggctttttcactgaacgta

SEQ ID NO: 5864 - RNA, 19 nt, synthetic construct
  source 1..19: mol_type = other RNA
gctttttcactgaacgtat

SEQ ID NO: 5865 - RNA, 19 nt, synthetic construct
  source 1..19: mol_type = other RNA
ctttttcactgaacgtatc

SEQ ID NO: 5866 - RNA, 19 nt, synthetic construct
  source 1..19: mol_type = other RNA
tttttcactgaacgtatca

SEQ ID NO: 5867 - RNA, 19 nt, synthetic construct
  source 1..19: mol_type = other RNA
ttttcactgaacgtatcag

SEQ ID NO: 5868 - RNA, 19 nt, synthetic construct
  source 1..19: mol_type = other RNA
tttcactgaacgtatcaga

SEQ ID NO: 5869 - RNA, 19 nt, synthetic construct
  source 1..19: mol_type = other RNA
ttcactgaacgtatcagaa

SEQ ID NO: 5870 - RNA, 19 nt, synthetic construct
  source 1..19: mol_type = other RNA
tcactgaacgtatcagaat

SEQ ID NO: 5871 - RNA, 19 nt, synthetic construct
  source 1..19: mol_type = other RNA
cactgaacgtatcagaata

SEQ ID NO: 5872 - RNA, 19 nt, synthetic construct
  source 1..19: mol_type = other RNA
actgaacgtatcagaatac

SEQ ID NO: 5873 - RNA, 19 nt, synthetic construct
  source 1..19: mol_type = other RNA
ctgaacgtatcagaataca

SEQ ID NO: 5874 - RNA, 19 nt, synthetic construct
  source 1..19: mol_type = other RNA
tgaacgtatcagaatacat

SEQ ID NO: 5875 - RNA, 19 nt, synthetic construct
  source 1..19: mol_type = other RNA
gaacgtatcagaatacatg

SEQ ID NO: 5876 - RNA, 19 nt, synthetic construct
  source 1..19: mol_type = other RNA
aacgtatcagaatacatgg

SEQ ID NO: 5877 - RNA, 19 nt, synthetic construct
  source 1..19: mol_type = other RNA
acgtatcagaatacatgga

SEQ ID NO: 5878 - RNA, 19 nt, synthetic construct
  source 1..19: mol_type = other RNA
cgtatcagaatacatggat

SEQ ID NO: 5879 - RNA, 19 nt, synthetic construct
  source 1..19: mol_type = other RNA
gtatcagaatacatggatg

SEQ ID NO: 5880 - RNA, 19 nt, synthetic construct
  source 1..19: mol_type = other RNA
tatcagaatacatggatga

SEQ ID NO: 5881 - RNA, 19 nt, synthetic construct
  source 1..19: mol_type = other RNA
atcagaatacatggatgaa

SEQ ID NO: 5882 - RNA, 19 nt, synthetic construct
  source 1..19: mol_type = other RNA
tcagaatacatggatgaat

SEQ ID NO: 5883 - RNA, 19 nt, synthetic construct
  source 1..19: mol_type = other RNA
cagaatacatggatgaatt

SEQ ID NO: 5884 - RNA, 19 nt, synthetic construct
  source 1..19: mol_type = other RNA
agaatacatggatgaattg

SEQ ID NO: 5885 - RNA, 19 nt, synthetic construct
  source 1..19: mol_type = other RNA
gaatacatggatgaattgg

SEQ ID NO: 5886 - RNA, 19 nt, synthetic construct
  source 1..19: mol_type = other RNA
aatacatggatgaattggg

SEQ ID NO: 5887 - RNA, 19 nt, synthetic construct
  source 1..19: mol_type = other RNA
atacatggatgaattgggg

SEQ ID NO: 5888 - RNA, 19 nt, synthetic construct
  source 1..19: mol_type = other RNA
tacatggatgaattggggt

SEQ ID NO: 5889 - RNA, 19 nt, synthetic construct
  source 1..19: mol_type = other RNA
acatggatgaattggggta

SEQ ID NO: 5890 - RNA, 19 nt, synthetic construct
  source 1..19: mol_type = other RNA
catggatgaattggggtaa

SEQ ID NO: 5891 - RNA, 19 nt, synthetic construct
  source 1..19: mol_type = other RNA
atggatgaattggggtaaa

SEQ ID NO: 5892 - RNA, 19 nt, synthetic construct
  source 1..19: mol_type = other RNA
tggatgaattggggtaaat

SEQ ID NO: 5893 - RNA, 19 nt, synthetic construct
  source 1..19: mol_type = other RNA
ggatgaattggggtaaata

SEQ ID NO: 5894 - RNA, 19 nt, synthetic construct
  source 1..19: mol_type = other RNA
gatgaattggggtaaataa

SEQ ID NO: 5895 - RNA, 19 nt, synthetic construct
  source 1..19: mol_type = other RNA
atgaattggggtaaataag

SEQ ID NO: 5896 - RNA, 19 nt, synthetic construct
  source 1..19: mol_type = other RNA
tgaattggggtaaataagg

SEQ ID NO: 5897 - RNA, 19 nt, synthetic construct
  source 1..19: mol_type = other RNA
gaattggggtaaataaggt

SEQ ID NO: 5898 - RNA, 19 nt, synthetic construct
  source 1..19: mol_type = other RNA
aattggggtaaataaggtt

SEQ ID NO: 5899 - RNA, 19 nt, synthetic construct
  source 1..19: mol_type = other RNA
attggggtaaataaggttt

SEQ ID NO: 5900 - RNA, 19 nt, synthetic construct
  source 1..19: mol_type = other RNA
ttggggtaaataaggtttt

SEQ ID NO: 5901 - RNA, 19 nt, synthetic construct
  source 1..19: mol_type = other RNA
tggggtaaataaggtttta

SEQ ID NO: 5902 - RNA, 19 nt, synthetic construct
  source 1..19: mol_type = other RNA
ggggtaaataaggttttaa

SEQ ID NO: 5903 - RNA, 19 nt, synthetic construct
  source 1..19: mol_type = other RNA
gggtaaataaggttttaat

SEQ ID NO: 5904 - RNA, 19 nt, synthetic construct
  source 1..19: mol_type = other RNA
ggtaaataaggttttaatt

SEQ ID NO: 5905 - RNA, 19 nt, synthetic construct
  source 1..19: mol_type = other RNA
gtaaataaggttttaattc

SEQ ID NO: 5906 - RNA, 19 nt, synthetic construct
  source 1..19: mol_type = other RNA
taaataaggttttaattca

SEQ ID NO: 5907 - RNA, 19 nt, synthetic construct
  source 1..19: mol_type = other RNA
aaataaggttttaattcag

SEQ ID NO: 5908 - RNA, 19 nt, synthetic construct
  source 1..19: mol_type = other RNA
aataaggttttaattcaga

SEQ ID NO: 5909 - RNA, 19 nt, synthetic construct
  source 1..19: mol_type = other RNA
ataaggttttaattcagat

SEQ ID NO: 5910 - RNA, 19 nt, synthetic construct
  source 1..19: mol_type = other RNA
taaggttttaattcagatc

SEQ ID NO: 5911 - RNA, 19 nt, synthetic construct
  source 1..19: mol_type = other RNA
aaggttttaattcagatct

SEQ ID NO: 5912 - RNA, 19 nt, synthetic construct
  source 1..19: mol_type = other RNA
aggttttaattcagatcta

SEQ ID NO: 5913 - RNA, 19 nt, synthetic construct
  source 1..19: mol_type = other RNA
ggttttaattcagatctag

SEQ ID NO: 5914 - RNA, 19 nt, synthetic construct
  source 1..19: mol_type = other RNA
gttttaattcagatctaga

SEQ ID NO: 5915 - RNA, 19 nt, synthetic construct
  source 1..19: mol_type = other RNA
ttttaattcagatctagaa

SEQ ID NO: 5916 - RNA, 19 nt, synthetic construct
  source 1..19: mol_type = other RNA
tttaattcagatctagaag

SEQ ID NO: 5917 - RNA, 19 nt, synthetic construct
  source 1..19: mol_type = other RNA
ttaattcagatctagaaga

SEQ ID NO: 5918 - RNA, 19 nt, synthetic construct
  source 1..19: mol_type = other RNA
taattcagatctagaagaa

SEQ ID NO: 5919 - RNA, 19 nt, synthetic construct
  source 1..19: mol_type = other RNA
aattcagatctagaagaaa

SEQ ID NO: 5920 - RNA, 19 nt, synthetic construct
  source 1..19: mol_type = other RNA
attcagatctagaagaaag

SEQ ID NO: 5921 - RNA, 19 nt, synthetic construct
  source 1..19: mol_type = other RNA
ttcagatctagaagaaagt

SEQ ID NO: 5922 - RNA, 19 nt, synthetic construct
  source 1..19: mol_type = other RNA
tcagatctagaagaaagta

SEQ ID NO: 5923 - RNA, 19 nt, synthetic construct
  source 1..19: mol_type = other RNA
cagatctagaagaaagtat

SEQ ID NO: 5924 - RNA, 19 nt, synthetic construct
  source 1..19: mol_type = other RNA
agatctagaagaaagtatt

SEQ ID NO: 5925 - RNA, 19 nt, synthetic construct
  source 1..19: mol_type = other RNA
gatctagaagaaagtattg

SEQ ID NO: 5926 - RNA, 19 nt, synthetic construct
  source 1..19: mol_type = other RNA
atctagaagaaagtattgt

SEQ ID NO: 5927 - RNA, 19 nt, synthetic construct
  source 1..19: mol_type = other RNA
tctagaagaaagtattgta

SEQ ID NO: 5928 - RNA, 19 nt, synthetic construct
  source 1..19: mol_type = other RNA
ctagaagaaagtattgtac

SEQ ID NO: 5929 - RNA, 19 nt, synthetic construct
  source 1..19: mol_type = other RNA
tagaagaaagtattgtacg

SEQ ID NO: 5930 - RNA, 19 nt, synthetic construct
  source 1..19: mol_type = other RNA
agaagaaagtattgtacgt

SEQ ID NO: 5931 - RNA, 19 nt, synthetic construct
  source 1..19: mol_type = other RNA
gaagaaagtattgtacgtt

SEQ ID NO: 5932 - RNA, 19 nt, synthetic construct
  source 1..19: mol_type = other RNA
aagaaagtattgtacgttt

SEQ ID NO: 5933 - RNA, 19 nt, synthetic construct
  source 1..19: mol_type = other RNA
agaaagtattgtacgtttg

SEQ ID NO: 5934 - RNA, 19 nt, synthetic construct
  source 1..19: mol_type = other RNA
gaaagtattgtacgtttga

SEQ ID NO: 5935 - RNA, 19 nt, synthetic construct
  source 1..19: mol_type = other RNA
aaagtattgtacgtttgaa

SEQ ID NO: 5936 - RNA, 19 nt, synthetic construct
  source 1..19: mol_type = other RNA
aagtattgtacgtttgaat

SEQ ID NO: 5937 - RNA, 19 nt, synthetic construct
  source 1..19: mol_type = other RNA
agtattgtacgtttgaatg

SEQ ID NO: 5938 - RNA, 19 nt, synthetic construct
  source 1..19: mol_type = other RNA
gtattgtacgtttgaatgc

SEQ ID NO: 5939 - RNA, 19 nt, synthetic construct
  source 1..19: mol_type = other RNA
tattgtacgtttgaatgca

SEQ ID NO: 5940 - RNA, 19 nt, synthetic construct
  source 1..19: mol_type = other RNA
attgtacgtttgaatgcag

SEQ ID NO: 5941 - RNA, 19 nt, synthetic construct
  source 1..19: mol_type = other RNA
ttgtacgtttgaatgcaga

SEQ ID NO: 5942 - RNA, 19 nt, synthetic construct
  source 1..19: mol_type = other RNA
tgtacgtttgaatgcagat

SEQ ID NO: 5943 - RNA, 19 nt, synthetic construct
  source 1..19: mol_type = other RNA
gtacgtttgaatgcagatt

SEQ ID NO: 5944 - RNA, 19 nt, synthetic construct
  source 1..19: mol_type = other RNA
tacgtttgaatgcagattt

SEQ ID NO: 5945 - RNA, 19 nt, synthetic construct
  source 1..19: mol_type = other RNA
acgtttgaatgcagatttt

SEQ ID NO: 5946 - RNA, 19 nt, synthetic construct
  source 1..19: mol_type = other RNA
cgtttgaatgcagattttt

SEQ ID NO: 5947 - RNA, 19 nt, synthetic construct
  source 1..19: mol_type = other RNA
gtttgaatgcagattttta

SEQ ID NO: 5948 - RNA, 19 nt, synthetic construct
  source 1..19: mol_type = other RNA
tttgaatgcagatttttat

SEQ ID NO: 5949 - RNA, 19 nt, synthetic construct
  source 1..19: mol_type = other RNA
ttgaatgcagatttttatc

SEQ ID NO: 5950 - RNA, 19 nt, synthetic construct
  source 1..19: mol_type = other RNA
tgaatgcagatttttatcc

SEQ ID NO: 5951 - RNA, 19 nt, synthetic construct
  source 1..19: mol_type = other RNA
gaatgcagatttttatcca

SEQ ID NO: 5952 - RNA, 19 nt, synthetic construct
  source 1..19: mol_type = other RNA
aatgcagatttttatccac

SEQ ID NO: 5953 - RNA, 19 nt, synthetic construct
  source 1..19: mol_type = other RNA
atgcagatttttatccaca

SEQ ID NO: 5954 - RNA, 19 nt, synthetic construct
  source 1..19: mol_type = other RNA
tgcagatttttatccacag

SEQ ID NO: 5955 - RNA, 19 nt, synthetic construct
  source 1..19: mol_type = other RNA
gcagatttttatccacaga

SEQ ID NO: 5956 - RNA, 19 nt, synthetic construct
  source 1..19: mol_type = other RNA
cagatttttatccacagat

SEQ ID NO: 5957 - RNA, 19 nt, synthetic construct
  source 1..19: mol_type = other RNA
agatttttatccacagata

SEQ ID NO: 5958 - RNA, 19 nt, synthetic construct
  source 1..19: mol_type = other RNA
gatttttatccacagatag

SEQ ID NO: 5959 - RNA, 19 nt, synthetic construct
  source 1..19: mol_type = other RNA
atttttatccacagatagt

SEQ ID NO: 5960 - RNA, 19 nt, synthetic construct
  source 1..19: mol_type = other RNA
tttttatccacagatagtt

SEQ ID NO: 5961 - RNA, 19 nt, synthetic construct
  source 1..19: mol_type = other RNA
ttttatccacagatagttg

SEQ ID NO: 5962 - RNA, 19 nt, synthetic construct
  source 1..19: mol_type = other RNA
tttatccacagatagttgt

SEQ ID NO: 5963 - RNA, 19 nt, synthetic construct
  source 1..19: mol_type = other RNA
ttatccacagatagttgta

SEQ ID NO: 5964 - RNA, 19 nt, synthetic construct
  source 1..19: mol_type = other RNA
tatccacagatagttgtag

SEQ ID NO: 5965 - RNA, 19 nt, synthetic construct
  source 1..19: mol_type = other RNA
atccacagatagttgtagt

SEQ ID NO: 5966 - RNA, 19 nt, synthetic construct
  source 1..19: mol_type = other RNA
tccacagatagttgtagtg

SEQ ID NO: 5967 - RNA, 19 nt, synthetic construct
  source 1..19: mol_type = other RNA
ccacagatagttgtagtgt

SEQ ID NO: 5968 - RNA, 19 nt, synthetic construct
  source 1..19: mol_type = other RNA
cacagatagttgtagtgtt

SEQ ID NO: 5969 - RNA, 19 nt, synthetic construct
  source 1..19: mol_type = other RNA
acagatagttgtagtgttt

SEQ ID NO: 5970 - RNA, 19 nt, synthetic construct
  source 1..19: mol_type = other RNA
cagatagttgtagtgttta

SEQ ID NO: 5971 - RNA, 19 nt, synthetic construct
  source 1..19: mol_type = other RNA
agatagttgtagtgtttag

SEQ ID NO: 5972 - RNA, 19 nt, synthetic construct
  source 1..19: mol_type = other RNA
gatagttgtagtgtttaga

SEQ ID NO: 5973 - RNA, 19 nt, synthetic construct
  source 1..19: mol_type = other RNA
atagttgtagtgtttagac

SEQ ID NO: 5974 - RNA, 19 nt, synthetic construct
  source 1..19: mol_type = other RNA
tagttgtagtgtttagaca

SEQ ID NO: 5975 - RNA, 19 nt, synthetic construct
  source 1..19: mol_type = other RNA
agttgtagtgtttagacat

SEQ ID NO: 5976 - RNA, 19 nt, synthetic construct
  source 1..19: mol_type = other RNA
gttgtagtgtttagacatg

SEQ ID NO: 5977 - RNA, 19 nt, synthetic construct
  source 1..19: mol_type = other RNA
ttgtagtgtttagacatga

SEQ ID NO: 5978 - RNA, 19 nt, synthetic construct
  source 1..19: mol_type = other RNA
tgtagtgtttagacatgac

SEQ ID NO: 5979 - RNA, 19 nt, synthetic construct
  source 1..19: mol_type = other RNA
gtagtgtttagacatgaca

SEQ ID NO: 5980 - RNA, 19 nt, synthetic construct
  source 1..19: mol_type = other RNA
tagtgtttagacatgacag

SEQ ID NO: 5981 - RNA, 19 nt, synthetic construct
  source 1..19: mol_type = other RNA
agtgtttagacatgacagg

SEQ ID NO: 5982 - RNA, 19 nt, synthetic construct
  source 1..19: mol_type = other RNA
gtgtttagacatgacagga

SEQ ID NO: 5983 - RNA, 19 nt, synthetic construct
  source 1..19: mol_type = other RNA
tgtttagacatgacaggac

SEQ ID NO: 5984 - RNA, 19 nt, synthetic construct
  source 1..19: mol_type = other RNA
gtttagacatgacaggacc

SEQ ID NO: 5985 - RNA, 19 nt, synthetic construct
  source 1..19: mol_type = other RNA
tttagacatgacaggacct

SEQ ID NO: 5986 - RNA, 19 nt, synthetic construct
  source 1..19: mol_type = other RNA
ttagacatgacaggaccta

SEQ ID NO: 5987 - RNA, 19 nt, synthetic construct
  source 1..19: mol_type = other RNA
tagacatgacaggacctat

SEQ ID NO: 5988 - RNA, 19 nt, synthetic construct
  source 1..19: mol_type = other RNA
agacatgacaggacctatc

SEQ ID NO: 5989 - RNA, 19 nt, synthetic construct
  source 1..19: mol_type = other RNA
gacatgacaggacctatcg

SEQ ID NO: 5990 - RNA, 19 nt, synthetic construct
  source 1..19: mol_type = other RNA
acatgacaggacctatcgt

SEQ ID NO: 5991 - RNA, 19 nt, synthetic construct
  source 1..19: mol_type = other RNA
catgacaggacctatcgtt

SEQ ID NO: 5992 - RNA, 19 nt, synthetic construct
  source 1..19: mol_type = other RNA
atgacaggacctatcgttg

SEQ ID NO: 5993 - RNA, 19 nt, synthetic construct
  source 1..19: mol_type = other RNA
tgacaggacctatcgttga

SEQ ID NO: 5994 - RNA, 19 nt, synthetic construct
  source 1..19: mol_type = other RNA
gacaggacctatcgttgag

SEQ ID NO: 5995 - RNA, 19 nt, synthetic construct
  source 1..19: mol_type = other RNA
acaggacctatcgttgagg

SEQ ID NO: 5996 - RNA, 19 nt, synthetic construct
  source 1..19: mol_type = other RNA
caggacctatcgttgaggt

SEQ ID NO: 5997 - RNA, 19 nt, synthetic construct
  source 1..19: mol_type = other RNA
aggacctatcgttgaggtt

SEQ ID NO: 5998 - RNA, 19 nt, synthetic construct
  source 1..19: mol_type = other RNA
ggacctatcgttgaggttt

SEQ ID NO: 5999 - RNA, 19 nt, synthetic construct
  source 1..19: mol_type = other RNA
gacctatcgttgaggtttc

SEQ ID NO: 6000 - RNA, 19 nt, synthetic construct
  source 1..19: mol_type = other RNA
acctatcgttgaggtttct

SEQ ID NO: 6001 - RNA, 19 nt, synthetic construct
  source 1..19: mol_type = other RNA
cctatcgttgaggtttcta

SEQ ID NO: 6002 - RNA, 19 nt, synthetic construct
  source 1..19: mol_type = other RNA
ctatcgttgaggtttctaa

SEQ ID NO: 6003 - RNA, 19 nt, synthetic construct
  source 1..19: mol_type = other RNA
tatcgttgaggtttctaag

SEQ ID NO: 6004 - RNA, 19 nt, synthetic construct
  source 1..19: mol_type = other RNA
atcgttgaggtttctaaga

SEQ ID NO: 6005 - RNA, 19 nt, synthetic construct
  source 1..19: mol_type = other RNA
tcgttgaggtttctaagac

SEQ ID NO: 6006 - RNA, 19 nt, synthetic construct
  source 1..19: mol_type = other RNA
cgttgaggtttctaagact

SEQ ID NO: 6007 - RNA, 19 nt, synthetic construct
  source 1..19: mol_type = other RNA
gttgaggtttctaagactt

SEQ ID NO: 6008 - RNA, 19 nt, synthetic construct
  source 1..19: mol_type = other RNA
ttgaggtttctaagactta

SEQ ID NO: 6009 - RNA, 19 nt, synthetic construct
  source 1..19: mol_type = other RNA
tgaggtttctaagacttac

SEQ ID NO: 6010 - RNA, 19 nt, synthetic construct
  source 1..19: mol_type = other RNA
gaggtttctaagacttact

SEQ ID NO: 6011 - RNA, 19 nt, synthetic construct
  source 1..19: mol_type = other RNA
aggtttctaagacttacta

SEQ ID NO: 6012 - RNA, 19 nt, synthetic construct
  source 1..19: mol_type = other RNA
ggtttctaagacttactat

SEQ ID NO: 6013 - RNA, 19 nt, synthetic construct
  source 1..19: mol_type = other RNA
gtttctaagacttactatg

SEQ ID NO: 6014 - RNA, 19 nt, synthetic construct
  source 1..19: mol_type = other RNA
tttctaagacttactatgg

SEQ ID NO: 6015 - RNA, 19 nt, synthetic construct
  source 1..19: mol_type = other RNA
ttctaagacttactatggg

SEQ ID NO: 6016 - RNA, 19 nt, synthetic construct
  source 1..19: mol_type = other RNA
tctaagacttactatgggc

SEQ ID NO: 6017 - RNA, 19 nt, synthetic construct
  source 1..19: mol_type = other RNA
ctaagacttactatgggct

SEQ ID NO: 6018 - RNA, 19 nt, synthetic construct
  source 1..19: mol_type = other RNA
taagacttactatgggctg

SEQ ID NO: 6019 - RNA, 19 nt, synthetic construct
  source 1..19: mol_type = other RNA
aagacttactatgggctgt

SEQ ID NO: 6020 - RNA, 19 nt, synthetic construct
  source 1..19: mol_type = other RNA
agacttactatgggctgta

SEQ ID NO: 6021 - RNA, 19 nt, synthetic construct
  source 1..19: mol_type = other RNA
gacttactatgggctgtaa

SEQ ID NO: 6022 - RNA, 19 nt, synthetic construct
  source 1..19: mol_type = other RNA
acttactatgggctgtaaa

SEQ ID NO: 6023 - RNA, 19 nt, synthetic construct
  source 1..19: mol_type = other RNA
cttactatgggctgtaaac

SEQ ID NO: 6024 - RNA, 19 nt, synthetic construct
  source 1..19: mol_type = other RNA
ttactatgggctgtaaacc

SEQ ID NO: 6025 - RNA, 19 nt, synthetic construct
  source 1..19: mol_type = other RNA
tactatgggctgtaaacct

SEQ ID NO: 6026 - RNA, 19 nt, synthetic construct
  source 1..19: mol_type = other RNA
actatgggctgtaaacctg

SEQ ID NO: 6027 - RNA, 19 nt, synthetic construct
  source 1..19: mol_type = other RNA
ctatgggctgtaaacctgt

SEQ ID NO: 6028 - RNA, 19 nt, synthetic construct
  source 1..19: mol_type = other RNA
tatgggctgtaaacctgtt

SEQ ID NO: 6029 - RNA, 19 nt, synthetic construct
  source 1..19: mol_type = other RNA
atgggctgtaaacctgttt

SEQ ID NO: 6030 - RNA, 19 nt, synthetic construct
  source 1..19: mol_type = other RNA
tgggctgtaaacctgtttt

SEQ ID NO: 6031 - RNA, 19 nt, synthetic construct
  source 1..19: mol_type = other RNA
gggctgtaaacctgttttt

SEQ ID NO: 6032 - RNA, 19 nt, synthetic construct
  source 1..19: mol_type = other RNA
ggctgtaaacctgtttttt

SEQ ID NO: 6033 - RNA, 19 nt, synthetic construct
  source 1..19: mol_type = other RNA
gctgtaaacctgtttttta

SEQ ID NO: 6034 - RNA, 19 nt, synthetic construct
  source 1..19: mol_type = other RNA
ctgtaaacctgttttttaa

SEQ ID NO: 6035 - RNA, 19 nt, synthetic construct
  source 1..19: mol_type = other RNA
tgtaaacctgttttttaaa

SEQ ID NO: 6036 - RNA, 19 nt, synthetic construct
  source 1..19: mol_type = other RNA
gtaaacctgttttttaaaa

SEQ ID NO: 6037 - RNA, 19 nt, synthetic construct
  source 1..19: mol_type = other RNA
taaacctgttttttaaaac

SEQ ID NO: 6038 - RNA, 19 nt, synthetic construct
  source 1..19: mol_type = other RNA
aaacctgttttttaaaact

SEQ ID NO: 6039 - RNA, 19 nt, synthetic construct
  source 1..19: mol_type = other RNA
aacctgttttttaaaacta

SEQ ID NO: 6040 - RNA, 19 nt, synthetic construct
  source 1..19: mol_type = other RNA
acctgttttttaaaactat

SEQ ID NO: 6041 - RNA, 19 nt, synthetic construct
  source 1..19: mol_type = other RNA
cctgttttttaaaactatt

SEQ ID NO: 6042 - RNA, 19 nt, synthetic construct
  source 1..19: mol_type = other RNA
ctgttttttaaaactattt

SEQ ID NO: 6043 - RNA, 19 nt, synthetic construct
  source 1..19: mol_type = other RNA
tgttttttaaaactatttt

SEQ ID NO: 6044 - RNA, 19 nt, synthetic construct
  source 1..19: mol_type = other RNA
gttttttaaaactatttta

SEQ ID NO: 6045 - RNA, 19 nt, synthetic construct
  source 1..19: mol_type = other RNA
ttttttaaaactattttag

SEQ ID NO: 6046 - RNA, 19 nt, synthetic construct
  source 1..19: mol_type = other RNA
tttttaaaactattttaga

SEQ ID NO: 6047 - RNA, 19 nt, synthetic construct
  source 1..19: mol_type = other RNA
ttttaaaactattttagaa

SEQ ID NO: 6048 - RNA, 19 nt, synthetic construct
  source 1..19: mol_type = other RNA
tttaaaactattttagaaa

SEQ ID NO: 6049 - RNA, 19 nt, synthetic construct
  source 1..19: mol_type = other RNA
ttaaaactattttagaaac

SEQ ID NO: 6050 - RNA, 19 nt, synthetic construct
  source 1..19: mol_type = other RNA
taaaactattttagaaacc

SEQ ID NO: 6051 - RNA, 19 nt, synthetic construct
  source 1..19: mol_type = other RNA
aaaactattttagaaacct

SEQ ID NO: 6052 - RNA, 19 nt, synthetic construct
  source 1..19: mol_type = other RNA
aaactattttagaaacctg

SEQ ID NO: 6053 - RNA, 19 nt, synthetic construct
  source 1..19: mol_type = other RNA
aactattttagaaacctga

SEQ ID NO: 6054 - RNA, 19 nt, synthetic construct
  source 1..19: mol_type = other RNA
actattttagaaacctgag

SEQ ID NO: 6055 - RNA, 19 nt, synthetic construct
  source 1..19: mol_type = other RNA
ctattttagaaacctgaga

SEQ ID NO: 6056 - RNA, 19 nt, synthetic construct
  source 1..19: mol_type = other RNA
tattttagaaacctgagac

SEQ ID NO: 6057 - RNA, 19 nt, synthetic construct
  source 1..19: mol_type = other RNA
attttagaaacctgagact

SEQ ID NO: 6058 - RNA, 19 nt, synthetic construct
  source 1..19: mol_type = other RNA
ttttagaaacctgagactt

SEQ ID NO: 6059 - RNA, 19 nt, synthetic construct
  source 1..19: mol_type = other RNA
tttagaaacctgagacttg

SEQ ID NO: 6060 - RNA, 19 nt, synthetic construct
  source 1..19: mol_type = other RNA
ttagaaacctgagacttgc

SEQ ID NO: 6061 - RNA, 19 nt, synthetic construct
  source 1..19: mol_type = other RNA
tagaaacctgagacttgcc

SEQ ID NO: 6062 - RNA, 19 nt, synthetic construct
  source 1..19: mol_type = other RNA
agaaacctgagacttgccg

SEQ ID NO: 6063 - RNA, 19 nt, synthetic construct
  source 1..19: mol_type = other RNA
gaaacctgagacttgccgt

SEQ ID NO: 6064 - RNA, 19 nt, synthetic construct
  source 1..19: mol_type = other RNA
aaacctgagacttgccgtc

SEQ ID NO: 6065 - RNA, 19 nt, synthetic construct
  source 1..19: mol_type = other RNA
aacctgagacttgccgtct

SEQ ID NO: 6066 - RNA, 19 nt, synthetic construct
  source 1..19: mol_type = other RNA
acctgagacttgccgtctg

SEQ ID NO: 6067 - RNA, 19 nt, synthetic construct
  source 1..19: mol_type = other RNA
cctgagacttgccgtctgg

SEQ ID NO: 6068 - RNA, 19 nt, synthetic construct
  source 1..19: mol_type = other RNA
ctgagacttgccgtctggc

SEQ ID NO: 6069 - RNA, 19 nt, synthetic construct
  source 1..19: mol_type = other RNA
tgagacttgccgtctggca

SEQ ID NO: 6070 - RNA, 19 nt, synthetic construct
  source 1..19: mol_type = other RNA
gagacttgccgtctggcat

SEQ ID NO: 6071 - RNA, 19 nt, synthetic construct
  source 1..19: mol_type = other RNA
agacttgccgtctggcatt

SEQ ID NO: 6072 - RNA, 19 nt, synthetic construct
  source 1..19: mol_type = other RNA
gacttgccgtctggcattt

SEQ ID NO: 6073 - RNA, 19 nt, synthetic construct
  source 1..19: mol_type = other RNA
acttgccgtctggcatttt

SEQ ID NO: 6074 - RNA, 19 nt, synthetic construct
  source 1..19: mol_type = other RNA
cttgccgtctggcatttta

SEQ ID NO: 6075 - RNA, 19 nt, synthetic construct
  source 1..19: mol_type = other RNA
ttgccgtctggcattttag

SEQ ID NO: 6076 - RNA, 19 nt, synthetic construct
  source 1..19: mol_type = other RNA
tgccgtctggcattttagt

SEQ ID NO: 6077 - RNA, 19 nt, synthetic construct
  source 1..19: mol_type = other RNA
gccgtctggcattttagtt

SEQ ID NO: 6078 - RNA, 19 nt, synthetic construct
  source 1..19: mol_type = other RNA
ccgtctggcattttagttt

SEQ ID NO: 6079 - RNA, 19 nt, synthetic construct
  source 1..19: mol_type = other RNA
cgtctggcattttagttta

SEQ ID NO: 6080 - RNA, 19 nt, synthetic construct
  source 1..19: mol_type = other RNA
gtctggcattttagtttaa

SEQ ID NO: 6081 - RNA, 19 nt, synthetic construct
  source 1..19: mol_type = other RNA
tctggcattttagtttaat

SEQ ID NO: 6082 - RNA, 19 nt, synthetic construct
  source 1..19: mol_type = other RNA
ctggcattttagtttaata

SEQ ID NO: 6083 - RNA, 19 nt, synthetic construct
  source 1..19: mol_type = other RNA
tggcattttagtttaatac

SEQ ID NO: 6084 - RNA, 19 nt, synthetic construct
  source 1..19: mol_type = other RNA
ggcattttagtttaataca

SEQ ID NO: 6085 - RNA, 19 nt, synthetic construct
  source 1..19: mol_type = other RNA
gcattttagtttaatacaa

SEQ ID NO: 6086 - RNA, 19 nt, synthetic construct
  source 1..19: mol_type = other RNA
cattttagtttaatacaaa

SEQ ID NO: 6087 - RNA, 19 nt, synthetic construct
  source 1..19: mol_type = other RNA
attttagtttaatacaaac

SEQ ID NO: 6088 - RNA, 19 nt, synthetic construct
  source 1..19: mol_type = other RNA
ttttagtttaatacaaact

SEQ ID NO: 6089 - RNA, 19 nt, synthetic construct
  source 1..19: mol_type = other RNA
tttagtttaatacaaacta

SEQ ID NO: 6090 - RNA, 19 nt, synthetic construct
  source 1..19: mol_type = other RNA
ttagtttaatacaaactaa

SEQ ID NO: 6091 - RNA, 19 nt, synthetic construct
  source 1..19: mol_type = other RNA
tagtttaatacaaactaat

SEQ ID NO: 6092 - RNA, 19 nt, synthetic construct
  source 1..19: mol_type = other RNA
agtttaatacaaactaatg

SEQ ID NO: 6093 - RNA, 19 nt, synthetic construct
  source 1..19: mol_type = other RNA
gtttaatacaaactaatga

SEQ ID NO: 6094 - RNA, 19 nt, synthetic construct
  source 1..19: mol_type = other RNA
tttaatacaaactaatgat

SEQ ID NO: 6095 - RNA, 19 nt, synthetic construct
  source 1..19: mol_type = other RNA
ttaatacaaactaatgatt

SEQ ID NO: 6096 - RNA, 19 nt, synthetic construct
  source 1..19: mol_type = other RNA
taatacaaactaatgattg

SEQ ID NO: 6097 - RNA, 19 nt, synthetic construct
  source 1..19: mol_type = other RNA
aatacaaactaatgattgc

SEQ ID NO: 6098 - RNA, 19 nt, synthetic construct
  source 1..19: mol_type = other RNA
atacaaactaatgattgca

SEQ ID NO: 6099 - RNA, 19 nt, synthetic construct
  source 1..19: mol_type = other RNA
tacaaactaatgattgcat

SEQ ID NO: 6100 - RNA, 19 nt, synthetic construct
  source 1..19: mol_type = other RNA
acaaactaatgattgcatt

SEQ ID NO: 6101 - RNA, 19 nt, synthetic construct
  source 1..19: mol_type = other RNA
caaactaatgattgcattt

SEQ ID NO: 6102 - RNA, 19 nt, synthetic construct
  source 1..19: mol_type = other RNA
aaactaatgattgcatttg

SEQ ID NO: 6103 - RNA, 19 nt, synthetic construct
  source 1..19: mol_type = other RNA
aactaatgattgcatttga

SEQ ID NO: 6104 - RNA, 19 nt, synthetic construct
  source 1..19: mol_type = other RNA
actaatgattgcatttgaa

SEQ ID NO: 6105 - RNA, 19 nt, synthetic construct
  source 1..19: mol_type = other RNA
ctaatgattgcatttgaaa

SEQ ID NO: 6106 - RNA, 19 nt, synthetic construct
  source 1..19: mol_type = other RNA
taatgattgcatttgaaag

SEQ ID NO: 6107 - RNA, 19 nt, synthetic construct
  source 1..19: mol_type = other RNA
aatgattgcatttgaaaga

SEQ ID NO: 6108 - RNA, 19 nt, synthetic construct
  source 1..19: mol_type = other RNA
atgattgcatttgaaagag

SEQ ID NO: 6109 - RNA, 19 nt, synthetic construct
  source 1..19: mol_type = other RNA
tgattgcatttgaaagaga

SEQ ID NO: 6110 - RNA, 19 nt, synthetic construct
  source 1..19: mol_type = other RNA
gattgcatttgaaagagat

SEQ ID NO: 6111 - RNA, 19 nt, synthetic construct
  source 1..19: mol_type = other RNA
attgcatttgaaagagatt

SEQ ID NO: 6112 - RNA, 19 nt, synthetic construct
  source 1..19: mol_type = other RNA
ttgcatttgaaagagattc

SEQ ID NO: 6113 - RNA, 19 nt, synthetic construct
  source 1..19: mol_type = other RNA
tgcatttgaaagagattct

SEQ ID NO: 6114 - RNA, 19 nt, synthetic construct
  source 1..19: mol_type = other RNA
gcatttgaaagagattctt

SEQ ID NO: 6115 - RNA, 19 nt, synthetic construct
  source 1..19: mol_type = other RNA
catttgaaagagattcttg

SEQ ID NO: 6116 - RNA, 19 nt, synthetic construct
  source 1..19: mol_type = other RNA
atttgaaagagattcttga

SEQ ID NO: 6117 - RNA, 19 nt, synthetic construct
  source 1..19: mol_type = other RNA
tttgaaagagattcttgac

SEQ ID NO: 6118 - RNA, 19 nt, synthetic construct
  source 1..19: mol_type = other RNA
ttgaaagagattcttgacc

SEQ ID NO: 6119 - RNA, 19 nt, synthetic construct
  source 1..19: mol_type = other RNA
tgaaagagattcttgacct

SEQ ID NO: 6120 - RNA, 19 nt, synthetic construct
  source 1..19: mol_type = other RNA
gaaagagattcttgacctt

SEQ ID NO: 6121 - RNA, 19 nt, synthetic construct
  source 1..19: mol_type = other RNA
aaagagattcttgacctta

SEQ ID NO: 6122 - RNA, 19 nt, synthetic construct
  source 1..19: mol_type = other RNA
aagagattcttgaccttat

SEQ ID NO: 6123 - RNA, 19 nt, synthetic construct
  source 1..19: mol_type = other RNA
agagattcttgaccttatt

SEQ ID NO: 6124 - RNA, 19 nt, synthetic construct
  source 1..19: mol_type = other RNA
gagattcttgaccttattt

SEQ ID NO: 6125 - RNA, 19 nt, synthetic construct
  source 1..19: mol_type = other RNA
agattcttgaccttatttc

SEQ ID NO: 6126 - RNA, 19 nt, synthetic construct
  source 1..19: mol_type = other RNA
gattcttgaccttatttct

SEQ ID NO: 6127 - RNA, 19 nt, synthetic construct
  source 1..19: mol_type = other RNA
attcttgaccttatttcta

SEQ ID NO: 6128 - RNA, 19 nt, synthetic construct
  source 1..19: mol_type = other RNA
ttcttgaccttatttctaa

SEQ ID NO: 6129 - RNA, 19 nt, synthetic construct
  source 1..19: mol_type = other RNA
tcttgaccttatttctaaa

SEQ ID NO: 6130 - RNA, 19 nt, synthetic construct
  source 1..19: mol_type = other RNA
cttgaccttatttctaaac

SEQ ID NO: 6131 - RNA, 19 nt, synthetic construct
  source 1..19: mol_type = other RNA
ttgaccttatttctaaacg

SEQ ID NO: 6132 - RNA, 19 nt, synthetic construct
  source 1..19: mol_type = other RNA
tgaccttatttctaaacgt

SEQ ID NO: 6133 - RNA, 19 nt, synthetic construct
  source 1..19: mol_type = other RNA
gaccttatttctaaacgtc

SEQ ID NO: 6134 - RNA, 19 nt, synthetic construct
  source 1..19: mol_type = other RNA
accttatttctaaacgtct

SEQ ID NO: 6135 - RNA, 19 nt, synthetic construct
  source 1..19: mol_type = other RNA
ccttatttctaaacgtcta

SEQ ID NO: 6136 - RNA, 19 nt, synthetic construct
  source 1..19: mol_type = other RNA
cttatttctaaacgtctag

SEQ ID NO: 6137 - RNA, 19 nt, synthetic construct
  source 1..19: mol_type = other RNA
ttatttctaaacgtctaga

SEQ ID NO: 6138 - RNA, 19 nt, synthetic construct
  source 1..19: mol_type = other RNA
tatttctaaacgtctagag

SEQ ID NO: 6139 - RNA, 19 nt, synthetic construct
  source 1..19: mol_type = other RNA
atttctaaacgtctagagc

SEQ ID NO: 6140 - RNA, 19 nt, synthetic construct
  source 1..19: mol_type = other RNA
tttctaaacgtctagagct

SEQ ID NO: 6141 - RNA, 19 nt, synthetic construct
  source 1..19: mol_type = other RNA
ttctaaacgtctagagctc

SEQ ID NO: 6142 - RNA, 19 nt, synthetic construct
  source 1..19: mol_type = other RNA
tctaaacgtctagagctct

SEQ ID NO: 6143 - RNA, 19 nt, synthetic construct
  source 1..19: mol_type = other RNA
ctaaacgtctagagctctg

SEQ ID NO: 6144 - RNA, 19 nt, synthetic construct
  source 1..19: mol_type = other RNA
taaacgtctagagctctga

SEQ ID NO: 6145 - RNA, 19 nt, synthetic construct
  source 1..19: mol_type = other RNA
aaacgtctagagctctgaa

SEQ ID NO: 6146 - RNA, 19 nt, synthetic construct
  source 1..19: mol_type = other RNA
aacgtctagagctctgaaa

SEQ ID NO: 6147 - RNA, 19 nt, synthetic construct
  source 1..19: mol_type = other RNA
acgtctagagctctgaaat

SEQ ID NO: 6148 - RNA, 19 nt, synthetic construct
  source 1..19: mol_type = other RNA
cgtctagagctctgaaatg

SEQ ID NO: 6149 - RNA, 19 nt, synthetic construct
  source 1..19: mol_type = other RNA
gtctagagctctgaaatgt

SEQ ID NO: 6150 - RNA, 19 nt, synthetic construct
  source 1..19: mol_type = other RNA
tctagagctctgaaatgtc

SEQ ID NO: 6151 - RNA, 19 nt, synthetic construct
  source 1..19: mol_type = other RNA
ctagagctctgaaatgtct

SEQ ID NO: 6152 - RNA, 19 nt, synthetic construct
  source 1..19: mol_type = other RNA
tagagctctgaaatgtctt

SEQ ID NO: 6153 - RNA, 19 nt, synthetic construct
  source 1..19: mol_type = other RNA
agagctctgaaatgtcttg

SEQ ID NO: 6154 - RNA, 19 nt, synthetic construct
  source 1..19: mol_type = other RNA
gagctctgaaatgtcttga

SEQ ID NO: 6155 - RNA, 19 nt, synthetic construct
  source 1..19: mol_type = other RNA
agctctgaaatgtcttgat

SEQ ID NO: 6156 - RNA, 19 nt, synthetic construct
  source 1..19: mol_type = other RNA
gctctgaaatgtcttgatg

SEQ ID NO: 6157 - RNA, 19 nt, synthetic construct
  source 1..19: mol_type = other RNA
ctctgaaatgtcttgatgg

SEQ ID NO: 6158 - RNA, 19 nt, synthetic construct
  source 1..19: mol_type = other RNA
tctgaaatgtcttgatgga

SEQ ID NO: 6159 - RNA, 19 nt, synthetic construct
  source 1..19: mol_type = other RNA
ctgaaatgtcttgatggaa

SEQ ID NO: 6160 - RNA, 19 nt, synthetic construct
  source 1..19: mol_type = other RNA
tgaaatgtcttgatggaag

SEQ ID NO: 6161 - RNA, 19 nt, synthetic construct
  source 1..19: mol_type = other RNA
gaaatgtcttgatggaagg

SEQ ID NO: 6162 - RNA, 19 nt, synthetic construct
  source 1..19: mol_type = other RNA
aaatgtcttgatggaaggt

SEQ ID NO: 6163 - RNA, 19 nt, synthetic construct
  source 1..19: mol_type = other RNA
aatgtcttgatggaaggta

SEQ ID NO: 6164 - RNA, 19 nt, synthetic construct
  source 1..19: mol_type = other RNA
atgtcttgatggaaggtat

SEQ ID NO: 6165 - RNA, 19 nt, synthetic construct
  source 1..19: mol_type = other RNA
tgtcttgatggaaggtatt

SEQ ID NO: 6166 - RNA, 19 nt, synthetic construct
  source 1..19: mol_type = other RNA
gtcttgatggaaggtatta

SEQ ID NO: 6167 - RNA, 19 nt, synthetic construct
  source 1..19: mol_type = other RNA
tcttgatggaaggtattaa

SEQ ID NO: 6168 - RNA, 19 nt, synthetic construct
  source 1..19: mol_type = other RNA
cttgatggaaggtattaaa

SEQ ID NO: 6169 - RNA, 19 nt, synthetic construct
  source 1..19: mol_type = other RNA
ttgatggaaggtattaaac

SEQ ID NO: 6170 - RNA, 19 nt, synthetic construct
  source 1..19: mol_type = other RNA
tgatggaaggtattaaact

SEQ ID NO: 6171 - RNA, 19 nt, synthetic construct
  source 1..19: mol_type = other RNA
gatggaaggtattaaacta

SEQ ID NO: 6172 - RNA, 19 nt, synthetic construct
  source 1..19: mol_type = other RNA
atggaaggtattaaactat

SEQ ID NO: 6173 - RNA, 19 nt, synthetic construct
  source 1..19: mol_type = other RNA
tggaaggtattaaactatt

SEQ ID NO: 6174 - RNA, 19 nt, synthetic construct
  source 1..19: mol_type = other RNA
ggaaggtattaaactattt

SEQ ID NO: 6175 - RNA, 19 nt, synthetic construct
  source 1..19: mol_type = other RNA
gaaggtattaaactatttg

SEQ ID NO: 6176 - RNA, 19 nt, synthetic construct
  source 1..19: mol_type = other RNA
aaggtattaaactatttgc

SEQ ID NO: 6177 - RNA, 19 nt, synthetic construct
  source 1..19: mol_type = other RNA
aggtattaaactatttgcc

SEQ ID NO: 6178 - RNA, 19 nt, synthetic construct
  source 1..19: mol_type = other RNA
ggtattaaactatttgcct

SEQ ID NO: 6179 - RNA, 19 nt, synthetic construct
  source 1..19: mol_type = other RNA
gtattaaactatttgcctg

SEQ ID NO: 6180 - RNA, 19 nt, synthetic construct
  source 1..19: mol_type = other RNA
tattaaactatttgcctgt

SEQ ID NO: 6181 - RNA, 19 nt, synthetic construct
  source 1..19: mol_type = other RNA
attaaactatttgcctgtt

SEQ ID NO: 6182 - RNA, 19 nt, synthetic construct
  source 1..19: mol_type = other RNA
ttaaactatttgcctgttg

SEQ ID NO: 6183 - RNA, 19 nt, synthetic construct
  source 1..19: mol_type = other RNA
taaactatttgcctgttgt

SEQ ID NO: 6184 - RNA, 19 nt, synthetic construct
  source 1..19: mol_type = other RNA
aaactatttgcctgttgta

SEQ ID NO: 6185 - RNA, 19 nt, synthetic construct
  source 1..19: mol_type = other RNA
aactatttgcctgttgtac

SEQ ID NO: 6186 - RNA, 19 nt, synthetic construct
  source 1..19: mol_type = other RNA
actatttgcctgttgtaca

SEQ ID NO: 6187 - RNA, 19 nt, synthetic construct
  source 1..19: mol_type = other RNA
ctatttgcctgttgtacaa

SEQ ID NO: 6188 - RNA, 19 nt, synthetic construct
  source 1..19: mol_type = other RNA
tatttgcctgttgtacaaa

SEQ ID NO: 6189 - RNA, 19 nt, synthetic construct
  source 1..19: mol_type = other RNA
atttgcctgttgtacaaag

SEQ ID NO: 6190 - RNA, 19 nt, synthetic construct
  source 1..19: mol_type = other RNA
tttgcctgttgtacaaaga

SEQ ID NO: 6191 - RNA, 19 nt, synthetic construct
  source 1..19: mol_type = other RNA
ttgcctgttgtacaaagaa

SEQ ID NO: 6192 - RNA, 19 nt, synthetic construct
  source 1..19: mol_type = other RNA
tgcctgttgtacaaagaaa

SEQ ID NO: 6193 - RNA, 19 nt, synthetic construct
  source 1..19: mol_type = other RNA
gcctgttgtacaaagaaat

SEQ ID NO: 6194 - RNA, 19 nt, synthetic construct
  source 1..19: mol_type = other RNA
cctgttgtacaaagaaatg

SEQ ID NO: 6195 - RNA, 19 nt, synthetic construct
  source 1..19: mol_type = other RNA
ctgttgtacaaagaaatgt

SEQ ID NO: 6196 - RNA, 19 nt, synthetic construct
  source 1..19: mol_type = other RNA
tgttgtacaaagaaatgtt

SEQ ID NO: 6197 - RNA, 19 nt, synthetic construct
  source 1..19: mol_type = other RNA
gttgtacaaagaaatgtta

SEQ ID NO: 6198 - RNA, 19 nt, synthetic construct
  source 1..19: mol_type = other RNA
ttgtacaaagaaatgttaa

SEQ ID NO: 6199 - RNA, 19 nt, synthetic construct
  source 1..19: mol_type = other RNA
tgtacaaagaaatgttaag

SEQ ID NO: 6200 - RNA, 19 nt, synthetic construct
  source 1..19: mol_type = other RNA
gtacaaagaaatgttaaga

SEQ ID NO: 6201 - RNA, 19 nt, synthetic construct
  source 1..19: mol_type = other RNA
tacaaagaaatgttaagac

SEQ ID NO: 6202 - RNA, 19 nt, synthetic construct
  source 1..19: mol_type = other RNA
acaaagaaatgttaagact

SEQ ID NO: 6203 - RNA, 19 nt, synthetic construct
  source 1..19: mol_type = other RNA
caaagaaatgttaagactc

SEQ ID NO: 6204 - RNA, 19 nt, synthetic construct
  source 1..19: mol_type = other RNA
aaagaaatgttaagactcg

SEQ ID NO: 6205 - RNA, 19 nt, synthetic construct
  source 1..19: mol_type = other RNA
aagaaatgttaagactcgt

SEQ ID NO: 6206 - RNA, 19 nt, synthetic construct
  source 1..19: mol_type = other RNA
agaaatgttaagactcgtg

SEQ ID NO: 6207 - RNA, 19 nt, synthetic construct
  source 1..19: mol_type = other RNA
gaaatgttaagactcgtga

SEQ ID NO: 6208 - RNA, 19 nt, synthetic construct
  source 1..19: mol_type = other RNA
aaatgttaagactcgtgaa

SEQ ID NO: 6209 - RNA, 19 nt, synthetic construct
  source 1..19: mol_type = other RNA
aatgttaagactcgtgaaa

SEQ ID NO: 6210 - RNA, 19 nt, synthetic construct
  source 1..19: mol_type = other RNA
atgttaagactcgtgaaaa

SEQ ID NO: 6211 - RNA, 19 nt, synthetic construct
  source 1..19: mol_type = other RNA
tgttaagactcgtgaaaag

SEQ ID NO: 6212 - RNA, 19 nt, synthetic construct
  source 1..19: mol_type = other RNA
gttaagactcgtgaaaaga

SEQ ID NO: 6213 - RNA, 19 nt, synthetic construct
  source 1..19: mol_type = other RNA
ttaagactcgtgaaaagaa

SEQ ID NO: 6214 - RNA, 19 nt, synthetic construct
  source 1..19: mol_type = other RNA
taagactcgtgaaaagaat

SEQ ID NO: 6215 - RNA, 19 nt, synthetic construct
  source 1..19: mol_type = other RNA
aagactcgtgaaaagaatt

SEQ ID NO: 6216 - RNA, 19 nt, synthetic construct
  source 1..19: mol_type = other RNA
agactcgtgaaaagaatta

SEQ ID NO: 6217 - RNA, 19 nt, synthetic construct
  source 1..19: mol_type = other RNA
gactcgtgaaaagaattac

SEQ ID NO: 6218 - RNA, 19 nt, synthetic construct
  source 1..19: mol_type = other RNA
actcgtgaaaagaattact

SEQ ID NO: 6219 - RNA, 19 nt, synthetic construct
  source 1..19: mol_type = other RNA
ctcgtgaaaagaattacta

SEQ ID NO: 6220 - RNA, 19 nt, synthetic construct
  source 1..19: mol_type = other RNA
tcgtgaaaagaattactat

SEQ ID NO: 6221 - RNA, 19 nt, synthetic construct
  source 1..19: mol_type = other RNA
cgtgaaaagaattactata

SEQ ID NO: 6222 - RNA, 19 nt, synthetic construct
  source 1..19: mol_type = other RNA
gtgaaaagaattactataa

SEQ ID NO: 6223 - RNA, 19 nt, synthetic construct
  source 1..19: mol_type = other RNA
tgaaaagaattactataag

SEQ ID NO: 6224 - RNA, 19 nt, synthetic construct
  source 1..19: mol_type = other RNA
gaaaagaattactataagg

SEQ ID NO: 6225 - RNA, 19 nt, synthetic construct
  source 1..19: mol_type = other RNA
aaaagaattactataaggt

SEQ ID NO: 6226 - RNA, 19 nt, synthetic construct
  source 1..19: mol_type = other RNA
aaagaattactataaggta

SEQ ID NO: 6227 - RNA, 19 nt, synthetic construct
  source 1..19: mol_type = other RNA
aagaattactataaggtac

SEQ ID NO: 6228 - RNA, 19 nt, synthetic construct
  source 1..19: mol_type = other RNA
agaattactataaggtact

SEQ ID NO: 6229 - RNA, 19 nt, synthetic construct
  source 1..19: mol_type = other RNA
gaattactataaggtactg

SEQ ID NO: 6230 - RNA, 19 nt, synthetic construct
  source 1..19: mol_type = other RNA
aattactataaggtactgt

SEQ ID NO: 6231 - RNA, 19 nt, synthetic construct
  source 1..19: mol_type = other RNA
attactataaggtactgtg

SEQ ID NO: 6232 - RNA, 19 nt, synthetic construct
  source 1..19: mol_type = other RNA
ttactataaggtactgtga

SEQ ID NO: 6233 - RNA, 19 nt, synthetic construct
  source 1..19: mol_type = other RNA
tactataaggtactgtgaa

SEQ ID NO: 6234 - RNA, 19 nt, synthetic construct
  source 1..19: mol_type = other RNA
actataaggtactgtgaaa

SEQ ID NO: 6235 - RNA, 19 nt, synthetic construct
  source 1..19: mol_type = other RNA
ctataaggtactgtgaaat

SEQ ID NO: 6236 - RNA, 19 nt, synthetic construct
  source 1..19: mol_type = other RNA
tataaggtactgtgaaata

SEQ ID NO: 6237 - RNA, 19 nt, synthetic construct
  source 1..19: mol_type = other RNA
ataaggtactgtgaaataa

SEQ ID NO: 6238 - RNA, 19 nt, synthetic construct
  source 1..19: mol_type = other RNA
taaggtactgtgaaataac

SEQ ID NO: 6239 - RNA, 19 nt, synthetic construct
  source 1..19: mol_type = other RNA
aaggtactgtgaaataact

SEQ ID NO: 6240 - RNA, 19 nt, synthetic construct
  source 1..19: mol_type = other RNA
aggtactgtgaaataactg

SEQ ID NO: 6241 - RNA, 19 nt, synthetic construct
  source 1..19: mol_type = other RNA
ggtactgtgaaataactgc

SEQ ID NO: 6242 - RNA, 19 nt, synthetic construct
  source 1..19: mol_type = other RNA
gtactgtgaaataactgcg

SEQ ID NO: 6243 - RNA, 19 nt, synthetic construct
  source 1..19: mol_type = other RNA
tactgtgaaataactgcga

SEQ ID NO: 6244 - RNA, 19 nt, synthetic construct
  source 1..19: mol_type = other RNA
actgtgaaataactgcgat

SEQ ID NO: 6245 - RNA, 19 nt, synthetic construct
  source 1..19: mol_type = other RNA
ctgtgaaataactgcgatt

SEQ ID NO: 6246 - RNA, 19 nt, synthetic construct
  source 1..19: mol_type = other RNA
tgtgaaataactgcgattt

SEQ ID NO: 6247 - RNA, 19 nt, synthetic construct
  source 1..19: mol_type = other RNA
gtgaaataactgcgatttt

SEQ ID NO: 6248 - RNA, 19 nt, synthetic construct
  source 1..19: mol_type = other RNA
tgaaataactgcgattttg

SEQ ID NO: 6249 - RNA, 19 nt, synthetic construct
  source 1..19: mol_type = other RNA
gaaataactgcgattttgt

SEQ ID NO: 6250 - RNA, 19 nt, synthetic construct
  source 1..19: mol_type = other RNA
aaataactgcgattttgtg

SEQ ID NO: 6251 - RNA, 19 nt, synthetic construct
  source 1..19: mol_type = other RNA
aataactgcgattttgtga

SEQ ID NO: 6252 - RNA, 19 nt, synthetic construct
  source 1..19: mol_type = other RNA
ataactgcgattttgtgag

SEQ ID NO: 6253 - RNA, 19 nt, synthetic construct
  source 1..19: mol_type = other RNA
taactgcgattttgtgagc

SEQ ID NO: 6254 - RNA, 19 nt, synthetic construct
  source 1..19: mol_type = other RNA
aactgcgattttgtgagca

SEQ ID NO: 6255 - RNA, 19 nt, synthetic construct
  source 1..19: mol_type = other RNA
actgcgattttgtgagcaa

SEQ ID NO: 6256 - RNA, 19 nt, synthetic construct
  source 1..19: mol_type = other RNA
ctgcgattttgtgagcaaa

SEQ ID NO: 6257 - RNA, 19 nt, synthetic construct
  source 1..19: mol_type = other RNA
tgcgattttgtgagcaaaa

SEQ ID NO: 6258 - RNA, 19 nt, synthetic construct
  source 1..19: mol_type = other RNA
gcgattttgtgagcaaaac

SEQ ID NO: 6259 - RNA, 19 nt, synthetic construct
  source 1..19: mol_type = other RNA
cgattttgtgagcaaaaca

SEQ ID NO: 6260 - RNA, 19 nt, synthetic construct
  source 1..19: mol_type = other RNA
gattttgtgagcaaaacat

SEQ ID NO: 6261 - RNA, 19 nt, synthetic construct
  source 1..19: mol_type = other RNA
attttgtgagcaaaacata

SEQ ID NO: 6262 - RNA, 19 nt, synthetic construct
  source 1..19: mol_type = other RNA
ttttgtgagcaaaacatac

SEQ ID NO: 6263 - RNA, 19 nt, synthetic construct
  source 1..19: mol_type = other RNA
tttgtgagcaaaacatact

SEQ ID NO: 6264 - RNA, 19 nt, synthetic construct
  source 1..19: mol_type = other RNA
ttgtgagcaaaacatactt

SEQ ID NO: 6265 - RNA, 19 nt, synthetic construct
  source 1..19: mol_type = other RNA
tgtgagcaaaacatacttg

SEQ ID NO: 6266 - RNA, 19 nt, synthetic construct
  source 1..19: mol_type = other RNA
gtgagcaaaacatacttgg

SEQ ID NO: 6267 - RNA, 19 nt, synthetic construct
  source 1..19: mol_type = other RNA
tgagcaaaacatacttgga

SEQ ID NO: 6268 - RNA, 19 nt, synthetic construct
  source 1..19: mol_type = other RNA
gagcaaaacatacttggaa

SEQ ID NO: 6269 - RNA, 19 nt, synthetic construct
  source 1..19: mol_type = other RNA
agcaaaacatacttggaaa

SEQ ID NO: 6270 - RNA, 19 nt, synthetic construct
  source 1..19: mol_type = other RNA
gcaaaacatacttggaaat

SEQ ID NO: 6271 - RNA, 19 nt, synthetic construct
  source 1..19: mol_type = other RNA
caaaacatacttggaaatg

SEQ ID NO: 6272 - RNA, 19 nt, synthetic construct
  source 1..19: mol_type = other RNA
aaaacatacttggaaatgc

SEQ ID NO: 6273 - RNA, 19 nt, synthetic construct
  source 1..19: mol_type = other RNA
aaacatacttggaaatgct

SEQ ID NO: 6274 - RNA, 19 nt, synthetic construct
  source 1..19: mol_type = other RNA
aacatacttggaaatgctg

SEQ ID NO: 6275 - RNA, 19 nt, synthetic construct
  source 1..19: mol_type = other RNA
acatacttggaaatgctga

SEQ ID NO: 6276 - RNA, 19 nt, synthetic construct
  source 1..19: mol_type = other RNA
catacttggaaatgctgat

SEQ ID NO: 6277 - RNA, 19 nt, synthetic construct
  source 1..19: mol_type = other RNA
atacttggaaatgctgatt

SEQ ID NO: 6278 - RNA, 19 nt, synthetic construct
  source 1..19: mol_type = other RNA
tacttggaaatgctgattg

SEQ ID NO: 6279 - RNA, 19 nt, synthetic construct
  source 1..19: mol_type = other RNA
acttggaaatgctgattga

SEQ ID NO: 6280 - RNA, 19 nt, synthetic construct
  source 1..19: mol_type = other RNA
cttggaaatgctgattgat

SEQ ID NO: 6281 - RNA, 19 nt, synthetic construct
  source 1..19: mol_type = other RNA
ttggaaatgctgattgatt

SEQ ID NO: 6282 - RNA, 19 nt, synthetic construct
  source 1..19: mol_type = other RNA
tggaaatgctgattgattt

SEQ ID NO: 6283 - RNA, 19 nt, synthetic construct
  source 1..19: mol_type = other RNA
ggaaatgctgattgatttt

SEQ ID NO: 6284 - RNA, 19 nt, synthetic construct
  source 1..19: mol_type = other RNA
gaaatgctgattgattttt

SEQ ID NO: 6285 - RNA, 19 nt, synthetic construct
  source 1..19: mol_type = other RNA
aaatgctgattgattttta

SEQ ID NO: 6286 - RNA, 19 nt, synthetic construct
  source 1..19: mol_type = other RNA
aatgctgattgatttttat

SEQ ID NO: 6287 - RNA, 19 nt, synthetic construct
  source 1..19: mol_type = other RNA
atgctgattgatttttatg

SEQ ID NO: 6288 - RNA, 19 nt, synthetic construct
  source 1..19: mol_type = other RNA
tgctgattgatttttatgc

SEQ ID NO: 6289 - RNA, 19 nt, synthetic construct
  source 1..19: mol_type = other RNA
gctgattgatttttatgct

SEQ ID NO: 6290 - RNA, 19 nt, synthetic construct
  source 1..19: mol_type = other RNA
ctgattgatttttatgctt

SEQ ID NO: 6291 - RNA, 19 nt, synthetic construct
  source 1..19: mol_type = other RNA
tgattgatttttatgcttg

SEQ ID NO: 6292 - RNA, 19 nt, synthetic construct
  source 1..19: mol_type = other RNA
gattgatttttatgcttgt

SEQ ID NO: 6293 - RNA, 19 nt, synthetic construct
  source 1..19: mol_type = other RNA
attgatttttatgcttgtt

SEQ ID NO: 6294 - RNA, 19 nt, synthetic construct
  source 1..19: mol_type = other RNA
ttgatttttatgcttgtta

SEQ ID NO: 6295 - RNA, 19 nt, synthetic construct
  source 1..19: mol_type = other RNA
tgatttttatgcttgttag

SEQ ID NO: 6296 - RNA, 19 nt, synthetic construct
  source 1..19: mol_type = other RNA
gatttttatgcttgttagt

SEQ ID NO: 6297 - RNA, 19 nt, synthetic construct
  source 1..19: mol_type = other RNA
atttttatgcttgttagtg

SEQ ID NO: 6298 - RNA, 19 nt, synthetic construct
  source 1..19: mol_type = other RNA
tttttatgcttgttagtgt

SEQ ID NO: 6299 - RNA, 19 nt, synthetic construct
  source 1..19: mol_type = other RNA
ttttatgcttgttagtgta

SEQ ID NO: 6300 - RNA, 19 nt, synthetic construct
  source 1..19: mol_type = other RNA
tttatgcttgttagtgtat

SEQ ID NO: 6301 - RNA, 19 nt, synthetic construct
  source 1..19: mol_type = other RNA
ttatgcttgttagtgtatt

SEQ ID NO: 6302 - RNA, 19 nt, synthetic construct
  source 1..19: mol_type = other RNA
tatgcttgttagtgtattg

SEQ ID NO: 6303 - RNA, 19 nt, synthetic construct
  source 1..19: mol_type = other RNA
atgcttgttagtgtattgc

SEQ ID NO: 6304 - RNA, 19 nt, synthetic construct
  source 1..19: mol_type = other RNA
tgcttgttagtgtattgca

SEQ ID NO: 6305 - RNA, 19 nt, synthetic construct
  source 1..19: mol_type = other RNA
gcttgttagtgtattgcaa

SEQ ID NO: 6306 - RNA, 19 nt, synthetic construct
  source 1..19: mol_type = other RNA
cttgttagtgtattgcaag

SEQ ID NO: 6307 - RNA, 19 nt, synthetic construct
  source 1..19: mol_type = other RNA
ttgttagtgtattgcaaga

SEQ ID NO: 6308 - RNA, 19 nt, synthetic construct
  source 1..19: mol_type = other RNA
tgttagtgtattgcaagaa

SEQ ID NO: 6309 - RNA, 19 nt, synthetic construct
  source 1..19: mol_type = other RNA
gttagtgtattgcaagaaa

SEQ ID NO: 6310 - RNA, 19 nt, synthetic construct
  source 1..19: mol_type = other RNA
ttagtgtattgcaagaaac

SEQ ID NO: 6311 - RNA, 19 nt, synthetic construct
  source 1..19: mol_type = other RNA
tagtgtattgcaagaaaca

SEQ ID NO: 6312 - RNA, 19 nt, synthetic construct
  source 1..19: mol_type = other RNA
agtgtattgcaagaaacac

SEQ ID NO: 6313 - RNA, 19 nt, synthetic construct
  source 1..19: mol_type = other RNA
gtgtattgcaagaaacaca

SEQ ID NO: 6314 - RNA, 19 nt, synthetic construct
  source 1..19: mol_type = other RNA
tgtattgcaagaaacacag

SEQ ID NO: 6315 - RNA, 19 nt, synthetic construct
  source 1..19: mol_type = other RNA
gtattgcaagaaacacaga

SEQ ID NO: 6316 - RNA, 19 nt, synthetic construct
  source 1..19: mol_type = other RNA
tattgcaagaaacacagaa

SEQ ID NO: 6317 - RNA, 19 nt, synthetic construct
  source 1..19: mol_type = other RNA
attgcaagaaacacagaaa

SEQ ID NO: 6318 - RNA, 19 nt, synthetic construct
  source 1..19: mol_type = other RNA
ttgcaagaaacacagaaaa

SEQ ID NO: 6319 - RNA, 19 nt, synthetic construct
  source 1..19: mol_type = other RNA
tgcaagaaacacagaaaat

SEQ ID NO: 6320 - RNA, 19 nt, synthetic construct
  source 1..19: mol_type = other RNA
gcaagaaacacagaaaatg

SEQ ID NO: 6321 - RNA, 19 nt, synthetic construct
  source 1..19: mol_type = other RNA
caagaaacacagaaaatgt

SEQ ID NO: 6322 - RNA, 19 nt, synthetic construct
  source 1..19: mol_type = other RNA
aagaaacacagaaaatgta

SEQ ID NO: 6323 - RNA, 19 nt, synthetic construct
  source 1..19: mol_type = other RNA
agaaacacagaaaatgtag

SEQ ID NO: 6324 - RNA, 19 nt, synthetic construct
  source 1..19: mol_type = other RNA
gaaacacagaaaatgtagt

SEQ ID NO: 6325 - RNA, 19 nt, synthetic construct
  source 1..19: mol_type = other RNA
aaacacagaaaatgtagtt

SEQ ID NO: 6326 - RNA, 19 nt, synthetic construct
  source 1..19: mol_type = other RNA
aacacagaaaatgtagttt

SEQ ID NO: 6327 - RNA, 19 nt, synthetic construct
  source 1..19: mol_type = other RNA
acacagaaaatgtagtttt

SEQ ID NO: 6328 - RNA, 19 nt, synthetic construct
  source 1..19: mol_type = other RNA
cacagaaaatgtagttttg

SEQ ID NO: 6329 - RNA, 19 nt, synthetic construct
  source 1..19: mol_type = other RNA
acagaaaatgtagttttgt

SEQ ID NO: 6330 - RNA, 19 nt, synthetic construct
  source 1..19: mol_type = other RNA
cagaaaatgtagttttgtt

SEQ ID NO: 6331 - RNA, 19 nt, synthetic construct
  source 1..19: mol_type = other RNA
agaaaatgtagttttgttt

SEQ ID NO: 6332 - RNA, 19 nt, synthetic construct
  source 1..19: mol_type = other RNA
gaaaatgtagttttgtttt

SEQ ID NO: 6333 - RNA, 19 nt, synthetic construct
  source 1..19: mol_type = other RNA
aaaatgtagttttgtttta

SEQ ID NO: 6334 - RNA, 19 nt, synthetic construct
  source 1..19: mol_type = other RNA
aaatgtagttttgttttaa

SEQ ID NO: 6335 - RNA, 19 nt, synthetic construct
  source 1..19: mol_type = other RNA
aatgtagttttgttttaat

SEQ ID NO: 6336 - RNA, 19 nt, synthetic construct
  source 1..19: mol_type = other RNA
atgtagttttgttttaata

SEQ ID NO: 6337 - RNA, 19 nt, synthetic construct
  source 1..19: mol_type = other RNA
tgtagttttgttttaataa

SEQ ID NO: 6338 - RNA, 19 nt, synthetic construct
  source 1..19: mol_type = other RNA
gtagttttgttttaataaa

SEQ ID NO: 6339 - RNA, 19 nt, synthetic construct
  source 1..19: mol_type = other RNA
tagttttgttttaataaac

SEQ ID NO: 6340 - RNA, 19 nt, synthetic construct
  source 1..19: mol_type = other RNA
agttttgttttaataaacc

SEQ ID NO: 6341 - RNA, 19 nt, synthetic construct
  source 1..19: mol_type = other RNA
gttttgttttaataaacca

SEQ ID NO: 6342 - RNA, 19 nt, synthetic construct
  source 1..19: mol_type = other RNA
ttttgttttaataaaccaa

SEQ ID NO: 6343 - RNA, 19 nt, synthetic construct
  source 1..19: mol_type = other RNA
tttgttttaataaaccaaa

SEQ ID NO: 6344 - RNA, 19 nt, synthetic construct
  source 1..19: mol_type = other RNA
ttgttttaataaaccaaaa

SEQ ID NO: 6345 - RNA, 19 nt, synthetic construct
  source 1..19: mol_type = other RNA
tgttttaataaaccaaaaa

SEQ ID NO: 6346 - RNA, 19 nt, synthetic construct
  source 1..19: mol_type = other RNA
gttttaataaaccaaaaat

SEQ ID NO: 6347 - RNA, 19 nt, synthetic construct
  source 1..19: mol_type = other RNA
ttttaataaaccaaaaatt

SEQ ID NO: 6348 - RNA, 19 nt, synthetic construct
  source 1..19: mol_type = other RNA
tttaataaaccaaaaattg

SEQ ID NO: 6349 - RNA, 19 nt, synthetic construct
  source 1..19: mol_type = other RNA
ttaataaaccaaaaattga

SEQ ID NO: 6350 - RNA, 19 nt, synthetic construct
  source 1..19: mol_type = other RNA
taataaaccaaaaattgaa

SEQ ID NO: 6351 - RNA, 19 nt, synthetic construct
  source 1..19: mol_type = other RNA
aataaaccaaaaattgaac

SEQ ID NO: 6352 - RNA, 19 nt, synthetic construct
  source 1..19: mol_type = other RNA
ataaaccaaaaattgaaca

SEQ ID NO: 6353 - RNA, 19 nt, synthetic construct
  source 1..19: mol_type = other RNA
taaaccaaaaattgaacat

SEQ ID NO: 6354 - RNA, 19 nt, synthetic construct
  source 1..19: mol_type = other RNA
aaaccaaaaattgaacata

SEQ ID NO: 6355 - RNA, 19 nt, synthetic construct
  source 1..19: mol_type = other RNA
atgccagctgcagtggcgc

SEQ ID NO: 6356 - RNA, 19 nt, synthetic construct
  source 1..19: mol_type = other RNA
aatgccagctgcagtggcg

SEQ ID NO: 6357 - RNA, 19 nt, synthetic construct
  source 1..19: mol_type = other RNA
caatgccagctgcagtggc

SEQ ID NO: 6358 - RNA, 19 nt, synthetic construct
  source 1..19: mol_type = other RNA
ccaatgccagctgcagtgg

SEQ ID NO: 6359 - RNA, 19 nt, synthetic construct
  source 1..19: mol_type = other RNA
gccaatgccagctgcagtg

SEQ ID NO: 6360 - RNA, 19 nt, synthetic construct
  source 1..19: mol_type = other RNA
ggccaatgccagctgcagt

SEQ ID NO: 6361 - RNA, 19 nt, synthetic construct
  source 1..19: mol_type = other RNA
cggccaatgccagctgcag

SEQ ID NO: 6362 - RNA, 19 nt, synthetic construct
  source 1..19: mol_type = other RNA
ccggccaatgccagctgca

SEQ ID NO: 6363 - RNA, 19 nt, synthetic construct
  source 1..19: mol_type = other RNA
cccggccaatgccagctgc

SEQ ID NO: 6364 - RNA, 19 nt, synthetic construct
  source 1..19: mol_type = other RNA
tcccggccaatgccagctg

SEQ ID NO: 6365 - RNA, 19 nt, synthetic construct
  source 1..19: mol_type = other RNA
gtcccggccaatgccagct

SEQ ID NO: 6366 - RNA, 19 nt, synthetic construct
  source 1..19: mol_type = other RNA
agtcccggccaatgccagc

SEQ ID NO: 6367 - RNA, 19 nt, synthetic construct
  source 1..19: mol_type = other RNA
cagtcccggccaatgccag

SEQ ID NO: 6368 - RNA, 19 nt, synthetic construct
  source 1..19: mol_type = other RNA
ccagtcccggccaatgcca

SEQ ID NO: 6369 - RNA, 19 nt, synthetic construct
  source 1..19: mol_type = other RNA
tccagtcccggccaatgcc

SEQ ID NO: 6370 - RNA, 19 nt, synthetic construct
  source 1..19: mol_type = other RNA
ttccagtcccggccaatgc

SEQ ID NO: 6371 - RNA, 19 nt, synthetic construct
  source 1..19: mol_type = other RNA
cttccagtcccggccaatg

SEQ ID NO: 6372 - RNA, 19 nt, synthetic construct
  source 1..19: mol_type = other RNA
acttccagtcccggccaat

SEQ ID NO: 6373 - RNA, 19 nt, synthetic construct
  source 1..19: mol_type = other RNA
cacttccagtcccggccaa

SEQ ID NO: 6374 - RNA, 19 nt, synthetic construct
  source 1..19: mol_type = other RNA
gcacttccagtcccggcca

SEQ ID NO: 6375 - RNA, 19 nt, synthetic construct
  source 1..19: mol_type = other RNA
cgcacttccagtcccggcc

SEQ ID NO: 6376 - RNA, 19 nt, synthetic construct
  source 1..19: mol_type = other RNA
ccgcacttccagtcccggc

SEQ ID NO: 6377 - RNA, 19 nt, synthetic construct
  source 1..19: mol_type = other RNA
cccgcacttccagtcccgg

SEQ ID NO: 6378 - RNA, 19 nt, synthetic construct
  source 1..19: mol_type = other RNA
gcccgcacttccagtcccg

SEQ ID NO: 6379 - RNA, 19 nt, synthetic construct
  source 1..19: mol_type = other RNA
agcccgcacttccagtccc

SEQ ID NO: 6380 - RNA, 19 nt, synthetic construct
  source 1..19: mol_type = other RNA
aagcccgcacttccagtcc

SEQ ID NO: 6381 - RNA, 19 nt, synthetic construct
  source 1..19: mol_type = other RNA
gaagcccgcacttccagtc

SEQ ID NO: 6382 - RNA, 19 nt, synthetic construct
  source 1..19: mol_type = other RNA
agaagcccgcacttccagt

SEQ ID NO: 6383 - RNA, 19 nt, synthetic construct
  source 1..19: mol_type = other RNA
cagaagcccgcacttccag

SEQ ID NO: 6384 - RNA, 19 nt, synthetic construct
  source 1..19: mol_type = other RNA
gcagaagcccgcacttcca

SEQ ID NO: 6385 - RNA, 19 nt, synthetic construct
  source 1..19: mol_type = other RNA
tgcagaagcccgcacttcc

SEQ ID NO: 6386 - RNA, 19 nt, synthetic construct
  source 1..19: mol_type = other RNA
ctgcagaagcccgcacttc

SEQ ID NO: 6387 - RNA, 19 nt, synthetic construct
  source 1..19: mol_type = other RNA
gctgcagaagcccgcactt

SEQ ID NO: 6388 - RNA, 19 nt, synthetic construct
  source 1..19: mol_type = other RNA
tgctgcagaagcccgcact

SEQ ID NO: 6389 - RNA, 19 nt, synthetic construct
  source 1..19: mol_type = other RNA
ctgctgcagaagcccgcac

SEQ ID NO: 6390 - RNA, 19 nt, synthetic construct
  source 1..19: mol_type = other RNA
gctgctgcagaagcccgca

SEQ ID NO: 6391 - RNA, 19 nt, synthetic construct
  source 1..19: mol_type = other RNA
ggctgctgcagaagcccgc

SEQ ID NO: 6392 - RNA, 19 nt, synthetic construct
  source 1..19: mol_type = other RNA
cggctgctgcagaagcccg

SEQ ID NO: 6393 - RNA, 19 nt, synthetic construct
  source 1..19: mol_type = other RNA
tcggctgctgcagaagccc

SEQ ID NO: 6394 - RNA, 19 nt, synthetic construct
  source 1..19: mol_type = other RNA
ttcggctgctgcagaagcc

SEQ ID NO: 6395 - RNA, 19 nt, synthetic construct
  source 1..19: mol_type = other RNA
cttcggctgctgcagaagc

SEQ ID NO: 6396 - RNA, 19 nt, synthetic construct
  source 1..19: mol_type = other RNA
gcttcggctgctgcagaag

SEQ ID NO: 6397 - RNA, 19 nt, synthetic construct
  source 1..19: mol_type = other RNA
agcttcggctgctgcagaa

SEQ ID NO: 6398 - RNA, 19 nt, synthetic construct
  source 1..19: mol_type = other RNA
cagcttcggctgctgcaga

SEQ ID NO: 6399 - RNA, 19 nt, synthetic construct
  source 1..19: mol_type = other RNA
ccagcttcggctgctgcag

SEQ ID NO: 6400 - RNA, 19 nt, synthetic construct
  source 1..19: mol_type = other RNA
tccagcttcggctgctgca

SEQ ID NO: 6401 - RNA, 19 nt, synthetic construct
  source 1..19: mol_type = other RNA
ctccagcttcggctgctgc

SEQ ID NO: 6402 - RNA, 19 nt, synthetic construct
  source 1..19: mol_type = other RNA
gctccagcttcggctgctg

SEQ ID NO: 6403 - RNA, 19 nt, synthetic construct
  source 1..19: mol_type = other RNA
agctccagcttcggctgct

SEQ ID NO: 6404 - RNA, 19 nt, synthetic construct
  source 1..19: mol_type = other RNA
cagctccagcttcggctgc

SEQ ID NO: 6405 - RNA, 19 nt, synthetic construct
  source 1..19: mol_type = other RNA
gcagctccagcttcggctg

SEQ ID NO: 6406 - RNA, 19 nt, synthetic construct
  source 1..19: mol_type = other RNA
agcagctccagcttcggct

SEQ ID NO: 6407 - RNA, 19 nt, synthetic construct
  source 1..19: mol_type = other RNA
tagcagctccagcttcggc

SEQ ID NO: 6408 - RNA, 19 nt, synthetic construct
  source 1..19: mol_type = other RNA
ctagcagctccagcttcgg

SEQ ID NO: 6409 - RNA, 19 nt, synthetic construct
  source 1..19: mol_type = other RNA
cctagcagctccagcttcg

SEQ ID NO: 6410 - RNA, 19 nt, synthetic construct
  source 1..19: mol_type = other RNA
ccctagcagctccagcttc

SEQ ID NO: 6411 - RNA, 19 nt, synthetic construct
  source 1..19: mol_type = other RNA
gccctagcagctccagctt

SEQ ID NO: 6412 - RNA, 19 nt, synthetic construct
  source 1..19: mol_type = other RNA
tgccctagcagctccagct

SEQ ID NO: 6413 - RNA, 19 nt, synthetic construct
  source 1..19: mol_type = other RNA
ctgccctagcagctccagc

SEQ ID NO: 6414 - RNA, 19 nt, synthetic construct
  source 1..19: mol_type = other RNA
gctgccctagcagctccag

SEQ ID NO: 6415 - RNA, 19 nt, synthetic construct
  source 1..19: mol_type = other RNA
tgctgccctagcagctcca

SEQ ID NO: 6416 - RNA, 19 nt, synthetic construct
  source 1..19: mol_type = other RNA
ctgctgccctagcagctcc

SEQ ID NO: 6417 - RNA, 19 nt, synthetic construct
  source 1..19: mol_type = other RNA
gctgctgccctagcagctc

SEQ ID NO: 6418 - RNA, 19 nt, synthetic construct
  source 1..19: mol_type = other RNA
cgctgctgccctagcagct

SEQ ID NO: 6419 - RNA, 19 nt, synthetic construct
  source 1..19: mol_type = other RNA
ccgctgctgccctagcagc

SEQ ID NO: 6420 - RNA, 19 nt, synthetic construct
  source 1..19: mol_type = other RNA
gccgctgctgccctagcag

SEQ ID NO: 6421 - RNA, 19 nt, synthetic construct
  source 1..19: mol_type = other RNA
agccgctgctgccctagca

SEQ ID NO: 6422 - RNA, 19 nt, synthetic construct
  source 1..19: mol_type = other RNA
gagccgctgctgccctagc

SEQ ID NO: 6423 - RNA, 19 nt, synthetic construct
  source 1..19: mol_type = other RNA
ggagccgctgctgccctag

SEQ ID NO: 6424 - RNA, 19 nt, synthetic construct
  source 1..19: mol_type = other RNA
gggagccgctgctgcccta

SEQ ID NO: 6425 - RNA, 19 nt, synthetic construct
  source 1..19: mol_type = other RNA
ggggagccgctgctgccct

SEQ ID NO: 6426 - RNA, 19 nt, synthetic construct
  source 1..19: mol_type = other RNA
aggggagccgctgctgccc

SEQ ID NO: 6427 - RNA, 19 nt, synthetic construct
  source 1..19: mol_type = other RNA
caggggagccgctgctgcc

SEQ ID NO: 6428 - RNA, 19 nt, synthetic construct
  source 1..19: mol_type = other RNA
acaggggagccgctgctgc

SEQ ID NO: 6429 - RNA, 19 nt, synthetic construct
  source 1..19: mol_type = other RNA
aacaggggagccgctgctg

SEQ ID NO: 6430 - RNA, 19 nt, synthetic construct
  source 1..19: mol_type = other RNA
caacaggggagccgctgct

SEQ ID NO: 6431 - RNA, 19 nt, synthetic construct
  source 1..19: mol_type = other RNA
acaacaggggagccgctgc

SEQ ID NO: 6432 - RNA, 19 nt, synthetic construct
  source 1..19: mol_type = other RNA
tacaacaggggagccgctg

SEQ ID NO: 6433 - RNA, 19 nt, synthetic construct
  source 1..19: mol_type = other RNA
atacaacaggggagccgct

SEQ ID NO: 6434 - RNA, 19 nt, synthetic construct
  source 1..19: mol_type = other RNA
catacaacaggggagccgc

SEQ ID NO: 6435 - RNA, 19 nt, synthetic construct
  source 1..19: mol_type = other RNA
ccatacaacaggggagccg

SEQ ID NO: 6436 - RNA, 19 nt, synthetic construct
  source 1..19: mol_type = other RNA
tccatacaacaggggagcc

SEQ ID NO: 6437 - RNA, 19 nt, synthetic construct
  source 1..19: mol_type = other RNA
gtccatacaacaggggagc

SEQ ID NO: 6438 - RNA, 19 nt, synthetic construct
  source 1..19: mol_type = other RNA
tgtccatacaacaggggag

SEQ ID NO: 6439 - RNA, 19 nt, synthetic construct
  source 1..19: mol_type = other RNA
atgtccatacaacagggga

SEQ ID NO: 6440 - RNA, 19 nt, synthetic construct
  source 1..19: mol_type = other RNA
aatgtccatacaacagggg

SEQ ID NO: 6441 - RNA, 19 nt, synthetic construct
  source 1..19: mol_type = other RNA
gaatgtccatacaacaggg

SEQ ID NO: 6442 - RNA, 19 nt, synthetic construct
  source 1..19: mol_type = other RNA
agaatgtccatacaacagg

SEQ ID NO: 6443 - RNA, 19 nt, synthetic construct
  source 1..19: mol_type = other RNA
cagaatgtccatacaacag

SEQ ID NO: 6444 - RNA, 19 nt, synthetic construct
  source 1..19: mol_type = other RNA
gcagaatgtccatacaaca

SEQ ID NO: 6445 - RNA, 19 nt, synthetic construct
  source 1..19: mol_type = other RNA
tgcagaatgtccatacaac

SEQ ID NO: 6446 - RNA, 19 nt, synthetic construct
  source 1..19: mol_type = other RNA
gtgcagaatgtccatacaa

SEQ ID NO: 6447 - RNA, 19 nt, synthetic construct
  source 1..19: mol_type = other RNA
ggtgcagaatgtccataca

SEQ ID NO: 6448 - RNA, 19 nt, synthetic construct
  source 1..19: mol_type = other RNA
gggtgcagaatgtccatac

SEQ ID NO: 6449 - RNA, 19 nt, synthetic construct
  source 1..19: mol_type = other RNA
cgggtgcagaatgtccata

SEQ ID NO: 6450 - RNA, 19 nt, synthetic construct
  source 1..19: mol_type = other RNA
tcgggtgcagaatgtccat

SEQ ID NO: 6451 - RNA, 19 nt, synthetic construct
  source 1..19: mol_type = other RNA
ttcgggtgcagaatgtcca

SEQ ID NO: 6452 - RNA, 19 nt, synthetic construct
  source 1..19: mol_type = other RNA
tttcgggtgcagaatgtcc

SEQ ID NO: 6453 - RNA, 19 nt, synthetic construct
  source 1..19: mol_type = other RNA
gtttcgggtgcagaatgtc

SEQ ID NO: 6454 - RNA, 19 nt, synthetic construct
  source 1..19: mol_type = other RNA
agtttcgggtgcagaatgt

SEQ ID NO: 6455 - RNA, 19 nt, synthetic construct
  source 1..19: mol_type = other RNA
cagtttcgggtgcagaatg

SEQ ID NO: 6456 - RNA, 19 nt, synthetic construct
  source 1..19: mol_type = other RNA
tcagtttcgggtgcagaat

SEQ ID NO: 6457 - RNA, 19 nt, synthetic construct
  source 1..19: mol_type = other RNA
atcagtttcgggtgcagaa

SEQ ID NO: 6458 - RNA, 19 nt, synthetic construct
  source 1..19: mol_type = other RNA
tatcagtttcgggtgcaga

SEQ ID NO: 6459 - RNA, 19 nt, synthetic construct
  source 1..19: mol_type = other RNA
ctatcagtttcgggtgcag

SEQ ID NO: 6460 - RNA, 19 nt, synthetic construct
  source 1..19: mol_type = other RNA
gctatcagtttcgggtgca

SEQ ID NO: 6461 - RNA, 19 nt, synthetic construct
  source 1..19: mol_type = other RNA
agctatcagtttcgggtgc

SEQ ID NO: 6462 - RNA, 19 nt, synthetic construct
  source 1..19: mol_type = other RNA
cagctatcagtttcgggtg

SEQ ID NO: 6463 - RNA, 19 nt, synthetic construct
  source 1..19: mol_type = other RNA
tcagctatcagtttcgggt

SEQ ID NO: 6464 - RNA, 19 nt, synthetic construct
  source 1..19: mol_type = other RNA
ctcagctatcagtttcggg

SEQ ID NO: 6465 - RNA, 19 nt, synthetic construct
  source 1..19: mol_type = other RNA
actcagctatcagtttcgg

SEQ ID NO: 6466 - RNA, 19 nt, synthetic construct
  source 1..19: mol_type = other RNA
gactcagctatcagtttcg

SEQ ID NO: 6467 - RNA, 19 nt, synthetic construct
  source 1..19: mol_type = other RNA
ggactcagctatcagtttc

SEQ ID NO: 6468 - RNA, 19 nt, synthetic construct
  source 1..19: mol_type = other RNA
aggactcagctatcagttt

SEQ ID NO: 6469 - RNA, 19 nt, synthetic construct
  source 1..19: mol_type = other RNA
caggactcagctatcagtt

SEQ ID NO: 6470 - RNA, 19 nt, synthetic construct
  source 1..19: mol_type = other RNA
tcaggactcagctatcagt

SEQ ID NO: 6471 - RNA, 19 nt, synthetic construct
  source 1..19: mol_type = other RNA
ttcaggactcagctatcag

SEQ ID NO: 6472 - RNA, 19 nt, synthetic construct
  source 1..19: mol_type = other RNA
cttcaggactcagctatca

SEQ ID NO: 6473 - RNA, 19 nt, synthetic construct
  source 1..19: mol_type = other RNA
acttcaggactcagctatc

SEQ ID NO: 6474 - RNA, 19 nt, synthetic construct
  source 1..19: mol_type = other RNA
aacttcaggactcagctat

SEQ ID NO: 6475 - RNA, 19 nt, synthetic construct
  source 1..19: mol_type = other RNA
aaacttcaggactcagcta

SEQ ID NO: 6476 - RNA, 19 nt, synthetic construct
  source 1..19: mol_type = other RNA
aaaacttcaggactcagct

SEQ ID NO: 6477 - RNA, 19 nt, synthetic construct
  source 1..19: mol_type = other RNA
taaaacttcaggactcagc

SEQ ID NO: 6478 - RNA, 19 nt, synthetic construct
  source 1..19: mol_type = other RNA
ataaaacttcaggactcag

SEQ ID NO: 6479 - RNA, 19 nt, synthetic construct
  source 1..19: mol_type = other RNA
cataaaacttcaggactca

SEQ ID NO: 6480 - RNA, 19 nt, synthetic construct
  source 1..19: mol_type = other RNA
acataaaacttcaggactc

SEQ ID NO: 6481 - RNA, 19 nt, synthetic construct
  source 1..19: mol_type = other RNA
aacataaaacttcaggact

SEQ ID NO: 6482 - RNA, 19 nt, synthetic construct
  source 1..19: mol_type = other RNA
taacataaaacttcaggac

SEQ ID NO: 6483 - RNA, 19 nt, synthetic construct
  source 1..19: mol_type = other RNA
ataacataaaacttcagga

SEQ ID NO: 6484 - RNA, 19 nt, synthetic construct
  source 1..19: mol_type = other RNA
cataacataaaacttcagg

SEQ ID NO: 6485 - RNA, 19 nt, synthetic construct
  source 1..19: mol_type = other RNA
tcataacataaaacttcag

SEQ ID NO: 6486 - RNA, 19 nt, synthetic construct
  source 1..19: mol_type = other RNA
ttcataacataaaacttca

SEQ ID NO: 6487 - RNA, 19 nt, synthetic construct
  source 1..19: mol_type = other RNA
tttcataacataaaacttc

SEQ ID NO: 6488 - RNA, 19 nt, synthetic construct
  source 1..19: mol_type = other RNA
gtttcataacataaaactt

SEQ ID NO: 6489 - RNA, 19 nt, synthetic construct
  source 1..19: mol_type = other RNA
tgtttcataacataaaact

SEQ ID NO: 6490 - RNA, 19 nt, synthetic construct
  source 1..19: mol_type = other RNA
ctgtttcataacataaaac

SEQ ID NO: 6491 - RNA, 19 nt, synthetic construct
  source 1..19: mol_type = other RNA
tctgtttcataacataaaa

SEQ ID NO: 6492 - RNA, 19 nt, synthetic construct
  source 1..19: mol_type = other RNA
ttctgtttcataacataaa

SEQ ID NO: 6493 - RNA, 19 nt, synthetic construct
  source 1..19: mol_type = other RNA
cttctgtttcataacataa

SEQ ID NO: 6494 - RNA, 19 nt, synthetic construct
  source 1..19: mol_type = other RNA
tcttctgtttcataacata

SEQ ID NO: 6495 - RNA, 19 nt, synthetic construct
  source 1..19: mol_type = other RNA
ttcttctgtttcataacat

SEQ ID NO: 6496 - RNA, 19 nt, synthetic construct
  source 1..19: mol_type = other RNA
gttcttctgtttcataaca

SEQ ID NO: 6497 - RNA, 19 nt, synthetic construct
  source 1..19: mol_type = other RNA
agttcttctgtttcataac

SEQ ID NO: 6498 - RNA, 19 nt, synthetic construct
  source 1..19: mol_type = other RNA
aagttcttctgtttcataa

SEQ ID NO: 6499 - RNA, 19 nt, synthetic construct
  source 1..19: mol_type = other RNA
aaagttcttctgtttcata

SEQ ID NO: 6500 - RNA, 19 nt, synthetic construct
  source 1..19: mol_type = other RNA
gaaagttcttctgtttcat

SEQ ID NO: 6501 - RNA, 19 nt, synthetic construct
  source 1..19: mol_type = other RNA
tgaaagttcttctgtttca

SEQ ID NO: 6502 - RNA, 19 nt, synthetic construct
  source 1..19: mol_type = other RNA
atgaaagttcttctgtttc

SEQ ID NO: 6503 - RNA, 19 nt, synthetic construct
  source 1..19: mol_type = other RNA
gatgaaagttcttctgttt

SEQ ID NO: 6504 - RNA, 19 nt, synthetic construct
  source 1..19: mol_type = other RNA
ggatgaaagttcttctgtt

SEQ ID NO: 6505 - RNA, 19 nt, synthetic construct
  source 1..19: mol_type = other RNA
gggatgaaagttcttctgt

SEQ ID NO: 6506 - RNA, 19 nt, synthetic construct
  source 1..19: mol_type = other RNA
tgggatgaaagttcttctg

SEQ ID NO: 6507 - RNA, 19 nt, synthetic construct
  source 1..19: mol_type = other RNA
ctgggatgaaagttcttct

SEQ ID NO: 6508 - RNA, 19 nt, synthetic construct
  source 1..19: mol_type = other RNA
gctgggatgaaagttcttc

SEQ ID NO: 6509 - RNA, 19 nt, synthetic construct
  source 1..19: mol_type = other RNA
tgctgggatgaaagttctt

SEQ ID NO: 6510 - RNA, 19 nt, synthetic construct
  source 1..19: mol_type = other RNA
gtgctgggatgaaagttct

SEQ ID NO: 6511 - RNA, 19 nt, synthetic construct
  source 1..19: mol_type = other RNA
tgtgctgggatgaaagttc

SEQ ID NO: 6512 - RNA, 19 nt, synthetic construct
  source 1..19: mol_type = other RNA
atgtgctgggatgaaagtt

SEQ ID NO: 6513 - RNA, 19 nt, synthetic construct
  source 1..19: mol_type = other RNA
catgtgctgggatgaaagt

SEQ ID NO: 6514 - RNA, 19 nt, synthetic construct
  source 1..19: mol_type = other RNA
tcatgtgctgggatgaaag

SEQ ID NO: 6515 - RNA, 19 nt, synthetic construct
  source 1..19: mol_type = other RNA
atcatgtgctgggatgaaa

SEQ ID NO: 6516 - RNA, 19 nt, synthetic construct
  source 1..19: mol_type = other RNA
aatcatgtgctgggatgaa

SEQ ID NO: 6517 - RNA, 19 nt, synthetic construct
  source 1..19: mol_type = other RNA
aaatcatgtgctgggatga

SEQ ID NO: 6518 - RNA, 19 nt, synthetic construct
  source 1..19: mol_type = other RNA
caaatcatgtgctgggatg

SEQ ID NO: 6519 - RNA, 19 nt, synthetic construct
  source 1..19: mol_type = other RNA
ccaaatcatgtgctgggat

SEQ ID NO: 6520 - RNA, 19 nt, synthetic construct
  source 1..19: mol_type = other RNA
cccaaatcatgtgctggga

SEQ ID NO: 6521 - RNA, 19 nt, synthetic construct
  source 1..19: mol_type = other RNA
tcccaaatcatgtgctggg

SEQ ID NO: 6522 - RNA, 19 nt, synthetic construct
  source 1..19: mol_type = other RNA
ttcccaaatcatgtgctgg

SEQ ID NO: 6523 - RNA, 19 nt, synthetic construct
  source 1..19: mol_type = other RNA
attcccaaatcatgtgctg

SEQ ID NO: 6524 - RNA, 19 nt, synthetic construct
  source 1..19: mol_type = other RNA
aattcccaaatcatgtgct

SEQ ID NO: 6525 - RNA, 19 nt, synthetic construct
  source 1..19: mol_type = other RNA
taattcccaaatcatgtgc

SEQ ID NO: 6526 - RNA, 19 nt, synthetic construct
  source 1..19: mol_type = other RNA
gtaattcccaaatcatgtg

SEQ ID NO: 6527 - RNA, 19 nt, synthetic construct
  source 1..19: mol_type = other RNA
tgtaattcccaaatcatgt

SEQ ID NO: 6528 - RNA, 19 nt, synthetic construct
  source 1..19: mol_type = other RNA
gtgtaattcccaaatcatg

SEQ ID NO: 6529 - RNA, 19 nt, synthetic construct
  source 1..19: mol_type = other RNA
agtgtaattcccaaatcat

SEQ ID NO: 6530 - RNA, 19 nt, synthetic construct
  source 1..19: mol_type = other RNA
aagtgtaattcccaaatca

SEQ ID NO: 6531 - RNA, 19 nt, synthetic construct
  source 1..19: mol_type = other RNA
aaagtgtaattcccaaatc

SEQ ID NO: 6532 - RNA, 19 nt, synthetic construct
  source 1..19: mol_type = other RNA
caaagtgtaattcccaaat

SEQ ID NO: 6533 - RNA, 19 nt, synthetic construct
  source 1..19: mol_type = other RNA
acaaagtgtaattcccaaa

SEQ ID NO: 6534 - RNA, 19 nt, synthetic construct
  source 1..19: mol_type = other RNA
cacaaagtgtaattcccaa

SEQ ID NO: 6535 - RNA, 19 nt, synthetic construct
  source 1..19: mol_type = other RNA
tcacaaagtgtaattccca

SEQ ID NO: 6536 - RNA, 19 nt, synthetic construct
  source 1..19: mol_type = other RNA
gtcacaaagtgtaattccc

SEQ ID NO: 6537 - RNA, 19 nt, synthetic construct
  source 1..19: mol_type = other RNA
tgtcacaaagtgtaattcc

SEQ ID NO: 6538 - RNA, 19 nt, synthetic construct
  source 1..19: mol_type = other RNA
atgtcacaaagtgtaattc

SEQ ID NO: 6539 - RNA, 19 nt, synthetic construct
  source 1..19: mol_type = other RNA
catgtcacaaagtgtaatt

SEQ ID NO: 6540 - RNA, 19 nt, synthetic construct
  source 1..19: mol_type = other RNA
ccatgtcacaaagtgtaat

SEQ ID NO: 6541 - RNA, 19 nt, synthetic construct
  source 1..19: mol_type = other RNA
tccatgtcacaaagtgtaa

SEQ ID NO: 6542 - RNA, 19 nt, synthetic construct
  source 1..19: mol_type = other RNA
atccatgtcacaaagtgta

SEQ ID NO: 6543 - RNA, 19 nt, synthetic construct
  source 1..19: mol_type = other RNA
catccatgtcacaaagtgt

SEQ ID NO: 6544 - RNA, 19 nt, synthetic construct
  source 1..19: mol_type = other RNA
tcatccatgtcacaaagtg

SEQ ID NO: 6545 - RNA, 19 nt, synthetic construct
  source 1..19: mol_type = other RNA
ttcatccatgtcacaaagt

SEQ ID NO: 6546 - RNA, 19 nt, synthetic construct
  source 1..19: mol_type = other RNA
attcatccatgtcacaaag

SEQ ID NO: 6547 - RNA, 19 nt, synthetic construct
  source 1..19: mol_type = other RNA
gattcatccatgtcacaaa

SEQ ID NO: 6548 - RNA, 19 nt, synthetic construct
  source 1..19: mol_type = other RNA
agattcatccatgtcacaa

SEQ ID NO: 6549 - RNA, 19 nt, synthetic construct
  source 1..19: mol_type = other RNA
cagattcatccatgtcaca

SEQ ID NO: 6550 - RNA, 19 nt, synthetic construct
  source 1..19: mol_type = other RNA
gcagattcatccatgtcac

SEQ ID NO: 6551 - RNA, 19 nt, synthetic construct
  source 1..19: mol_type = other RNA
tgcagattcatccatgtca

SEQ ID NO: 6552 - RNA, 19 nt, synthetic construct
  source 1..19: mol_type = other RNA
gtgcagattcatccatgtc

SEQ ID NO: 6553 - RNA, 19 nt, synthetic construct
  source 1..19: mol_type = other RNA
agtgcagattcatccatgt

SEQ ID NO: 6554 - RNA, 19 nt, synthetic construct
  source 1..19: mol_type = other RNA
cagtgcagattcatccatg

SEQ ID NO: 6555 - RNA, 19 nt, synthetic construct
  source 1..19: mol_type = other RNA
tcagtgcagattcatccat

SEQ ID NO: 6556 - RNA, 19 nt, synthetic construct
  source 1..19: mol_type = other RNA
gtcagtgcagattcatcca

SEQ ID NO: 6557 - RNA, 19 nt, synthetic construct
  source 1..19: mol_type = other RNA
ggtcagtgcagattcatcc

SEQ ID NO: 6558 - RNA, 19 nt, synthetic construct
  source 1..19: mol_type = other RNA
gggtcagtgcagattcatc

SEQ ID NO: 6559 - RNA, 19 nt, synthetic construct
  source 1..19: mol_type = other RNA
agggtcagtgcagattcat

SEQ ID NO: 6560 - RNA, 19 nt, synthetic construct
  source 1..19: mol_type = other RNA
aagggtcagtgcagattca

SEQ ID NO: 6561 - RNA, 19 nt, synthetic construct
  source 1..19: mol_type = other RNA
caagggtcagtgcagattc

SEQ ID NO: 6562 - RNA, 19 nt, synthetic construct
  source 1..19: mol_type = other RNA
ccaagggtcagtgcagatt

SEQ ID NO: 6563 - RNA, 19 nt, synthetic construct
  source 1..19: mol_type = other RNA
accaagggtcagtgcagat

SEQ ID NO: 6564 - RNA, 19 nt, synthetic construct
  source 1..19: mol_type = other RNA
taccaagggtcagtgcaga

SEQ ID NO: 6565 - RNA, 19 nt, synthetic construct
  source 1..19: mol_type = other RNA
gtaccaagggtcagtgcag

SEQ ID NO: 6566 - RNA, 19 nt, synthetic construct
  source 1..19: mol_type = other RNA
tgtaccaagggtcagtgca

SEQ ID NO: 6567 - RNA, 19 nt, synthetic construct
  source 1..19: mol_type = other RNA
ttgtaccaagggtcagtgc

SEQ ID NO: 6568 - RNA, 19 nt, synthetic construct
  source 1..19: mol_type = other RNA
attgtaccaagggtcagtg

SEQ ID NO: 6569 - RNA, 19 nt, synthetic construct
  source 1..19: mol_type = other RNA
tattgtaccaagggtcagt

SEQ ID NO: 6570 - RNA, 19 nt, synthetic construct
  source 1..19: mol_type = other RNA
ctattgtaccaagggtcag

SEQ ID NO: 6571 - RNA, 19 nt, synthetic construct
  source 1..19: mol_type = other RNA
tctattgtaccaagggtca

SEQ ID NO: 6572 - RNA, 19 nt, synthetic construct
  source 1..19: mol_type = other RNA
atctattgtaccaagggtc

SEQ ID NO: 6573 - RNA, 19 nt, synthetic construct
  source 1..19: mol_type = other RNA
catctattgtaccaagggt

SEQ ID NO: 6574 - RNA, 19 nt, synthetic construct
  source 1..19: mol_type = other RNA
acatctattgtaccaaggg

SEQ ID NO: 6575 - RNA, 19 nt, synthetic construct
  source 1..19: mol_type = other RNA
aacatctattgtaccaagg

SEQ ID NO: 6576 - RNA, 19 nt, synthetic construct
  source 1..19: mol_type = other RNA
aaacatctattgtaccaag

SEQ ID NO: 6577 - RNA, 19 nt, synthetic construct
  source 1..19: mol_type = other RNA
gaaacatctattgtaccaa

SEQ ID NO: 6578 - RNA, 19 nt, synthetic construct
  source 1..19: mol_type = other RNA
agaaacatctattgtacca

SEQ ID NO: 6579 - RNA, 19 nt, synthetic construct
  source 1..19: mol_type = other RNA
aagaaacatctattgtacc

SEQ ID NO: 6580 - RNA, 19 nt, synthetic construct
  source 1..19: mol_type = other RNA
taagaaacatctattgtac

SEQ ID NO: 6581 - RNA, 19 nt, synthetic construct
  source 1..19: mol_type = other RNA
ataagaaacatctattgta

SEQ ID NO: 6582 - RNA, 19 nt, synthetic construct
  source 1..19: mol_type = other RNA
gataagaaacatctattgt

SEQ ID NO: 6583 - RNA, 19 nt, synthetic construct
  source 1..19: mol_type = other RNA
agataagaaacatctattg

SEQ ID NO: 6584 - RNA, 19 nt, synthetic construct
  source 1..19: mol_type = other RNA
cagataagaaacatctatt

SEQ ID NO: 6585 - RNA, 19 nt, synthetic construct
  source 1..19: mol_type = other RNA
gcagataagaaacatctat

SEQ ID NO: 6586 - RNA, 19 nt, synthetic construct
  source 1..19: mol_type = other RNA
ggcagataagaaacatcta

SEQ ID NO: 6587 - RNA, 19 nt, synthetic construct
  source 1..19: mol_type = other RNA
tggcagataagaaacatct

SEQ ID NO: 6588 - RNA, 19 nt, synthetic construct
  source 1..19: mol_type = other RNA
gtggcagataagaaacatc

SEQ ID NO: 6589 - RNA, 19 nt, synthetic construct
  source 1..19: mol_type = other RNA
tgtggcagataagaaacat

SEQ ID NO: 6590 - RNA, 19 nt, synthetic construct
  source 1..19: mol_type = other RNA
atgtggcagataagaaaca

SEQ ID NO: 6591 - RNA, 19 nt, synthetic construct
  source 1..19: mol_type = other RNA
aatgtggcagataagaaac

SEQ ID NO: 6592 - RNA, 19 nt, synthetic construct
  source 1..19: mol_type = other RNA
gaatgtggcagataagaaa

SEQ ID NO: 6593 - RNA, 19 nt, synthetic construct
  source 1..19: mol_type = other RNA
tgaatgtggcagataagaa

SEQ ID NO: 6594 - RNA, 19 nt, synthetic construct
  source 1..19: mol_type = other RNA
atgaatgtggcagataaga

SEQ ID NO: 6595 - RNA, 19 nt, synthetic construct
  source 1..19: mol_type = other RNA
gatgaatgtggcagataag

SEQ ID NO: 6596 - RNA, 19 nt, synthetic construct
  source 1..19: mol_type = other RNA
tgatgaatgtggcagataa

SEQ ID NO: 6597 - RNA, 19 nt, synthetic construct
  source 1..19: mol_type = other RNA
ctgatgaatgtggcagata

SEQ ID NO: 6598 - RNA, 19 nt, synthetic construct
  source 1..19: mol_type = other RNA
tctgatgaatgtggcagat

SEQ ID NO: 6599 - RNA, 19 nt, synthetic construct
  source 1..19: mol_type = other RNA
ttctgatgaatgtggcaga

SEQ ID NO: 6600 - RNA, 19 nt, synthetic construct
  source 1..19: mol_type = other RNA
attctgatgaatgtggcag

SEQ ID NO: 6601 - RNA, 19 nt, synthetic construct
  source 1..19: mol_type = other RNA
tattctgatgaatgtggca

SEQ ID NO: 6602 - RNA, 19 nt, synthetic construct
  source 1..19: mol_type = other RNA
gtattctgatgaatgtggc

SEQ ID NO: 6603 - RNA, 19 nt, synthetic construct
  source 1..19: mol_type = other RNA
tgtattctgatgaatgtgg

SEQ ID NO: 6604 - RNA, 19 nt, synthetic construct
  source 1..19: mol_type = other RNA
ctgtattctgatgaatgtg

SEQ ID NO: 6605 - RNA, 19 nt, synthetic construct
  source 1..19: mol_type = other RNA
actgtattctgatgaatgt

SEQ ID NO: 6606 - RNA, 19 nt, synthetic construct
  source 1..19: mol_type = other RNA
cactgtattctgatgaatg

SEQ ID NO: 6607 - RNA, 19 nt, synthetic construct
  source 1..19: mol_type = other RNA
acactgtattctgatgaat

SEQ ID NO: 6608 - RNA, 19 nt, synthetic construct
  source 1..19: mol_type = other RNA
aacactgtattctgatgaa

SEQ ID NO: 6609 - RNA, 19 nt, synthetic construct
  source 1..19: mol_type = other RNA
caacactgtattctgatga

SEQ ID NO: 6610 - RNA, 19 nt, synthetic construct
  source 1..19: mol_type = other RNA
ccaacactgtattctgatg

SEQ ID NO: 6611 - RNA, 19 nt, synthetic construct
  source 1..19: mol_type = other RNA
accaacactgtattctgat

SEQ ID NO: 6612 - RNA, 19 nt, synthetic construct
  source 1..19: mol_type = other RNA
gaccaacactgtattctga

SEQ ID NO: 6613 - RNA, 19 nt, synthetic construct
  source 1..19: mol_type = other RNA
cgaccaacactgtattctg

SEQ ID NO: 6614 - RNA, 19 nt, synthetic construct
  source 1..19: mol_type = other RNA
tcgaccaacactgtattct

SEQ ID NO: 6615 - RNA, 19 nt, synthetic construct
  source 1..19: mol_type = other RNA
atcgaccaacactgtattc

SEQ ID NO: 6616 - RNA, 19 nt, synthetic construct
  source 1..19: mol_type = other RNA
catcgaccaacactgtatt

SEQ ID NO: 6617 - RNA, 19 nt, synthetic construct
  source 1..19: mol_type = other RNA
acatcgaccaacactgtat

SEQ ID NO: 6618 - RNA, 19 nt, synthetic construct
  source 1..19: mol_type = other RNA
tacatcgaccaacactgta

SEQ ID NO: 6619 - RNA, 19 nt, synthetic construct
  source 1..19: mol_type = other RNA
ttacatcgaccaacactgt

SEQ ID NO: 6620 - RNA, 19 nt, synthetic construct
  source 1..19: mol_type = other RNA
cttacatcgaccaacactg

SEQ ID NO: 6621 - RNA, 19 nt, synthetic construct
  source 1..19: mol_type = other RNA
gcttacatcgaccaacact

SEQ ID NO: 6622 - RNA, 19 nt, synthetic construct
  source 1..19: mol_type = other RNA
tgcttacatcgaccaacac

SEQ ID NO: 6623 - RNA, 19 nt, synthetic construct
  source 1..19: mol_type = other RNA
gtgcttacatcgaccaaca

SEQ ID NO: 6624 - RNA, 19 nt, synthetic construct
  source 1..19: mol_type = other RNA
tgtgcttacatcgaccaac

SEQ ID NO: 6625 - RNA, 19 nt, synthetic construct
  source 1..19: mol_type = other RNA
gtgtgcttacatcgaccaa

SEQ ID NO: 6626 - RNA, 19 nt, synthetic construct
  source 1..19: mol_type = other RNA
tgtgtgcttacatcgacca

SEQ ID NO: 6627 - RNA, 19 nt, synthetic construct
  source 1..19: mol_type = other RNA
ttgtgtgcttacatcgacc

SEQ ID NO: 6628 - RNA, 19 nt, synthetic construct
  source 1..19: mol_type = other RNA
cttgtgtgcttacatcgac

SEQ ID NO: 6629 - RNA, 19 nt, synthetic construct
  source 1..19: mol_type = other RNA
acttgtgtgcttacatcga

SEQ ID NO: 6630 - RNA, 19 nt, synthetic construct
  source 1..19: mol_type = other RNA
cacttgtgtgcttacatcg

SEQ ID NO: 6631 - RNA, 19 nt, synthetic construct
  source 1..19: mol_type = other RNA
tcacttgtgtgcttacatc

SEQ ID NO: 6632 - RNA, 19 nt, synthetic construct
  source 1..19: mol_type = other RNA
ctcacttgtgtgcttacat

SEQ ID NO: 6633 - RNA, 19 nt, synthetic construct
  source 1..19: mol_type = other RNA
cctcacttgtgtgcttaca

SEQ ID NO: 6634 - RNA, 19 nt, synthetic construct
  source 1..19: mol_type = other RNA
tcctcacttgtgtgcttac

SEQ ID NO: 6635 - RNA, 19 nt, synthetic construct
  source 1..19: mol_type = other RNA
ttcctcacttgtgtgctta

SEQ ID NO: 6636 - RNA, 19 nt, synthetic construct
  source 1..19: mol_type = other RNA
attcctcacttgtgtgctt

SEQ ID NO: 6637 - RNA, 19 nt, synthetic construct
  source 1..19: mol_type = other RNA
cattcctcacttgtgtgct

SEQ ID NO: 6638 - RNA, 19 nt, synthetic construct
  source 1..19: mol_type = other RNA
ccattcctcacttgtgtgc

SEQ ID NO: 6639 - RNA, 19 nt, synthetic construct
  source 1..19: mol_type = other RNA
cccattcctcacttgtgtg

SEQ ID NO: 6640 - RNA, 19 nt, synthetic construct
  source 1..19: mol_type = other RNA
ccccattcctcacttgtgt

SEQ ID NO: 6641 - RNA, 19 nt, synthetic construct
  source 1..19: mol_type = other RNA
accccattcctcacttgtg

SEQ ID NO: 6642 - RNA, 19 nt, synthetic construct
  source 1..19: mol_type = other RNA
caccccattcctcacttgt

SEQ ID NO: 6643 - RNA, 19 nt, synthetic construct
  source 1..19: mol_type = other RNA
tcaccccattcctcacttg

SEQ ID NO: 6644 - RNA, 19 nt, synthetic construct
  source 1..19: mol_type = other RNA
ctcaccccattcctcactt

SEQ ID NO: 6645 - RNA, 19 nt, synthetic construct
  source 1..19: mol_type = other RNA
actcaccccattcctcact

SEQ ID NO: 6646 - RNA, 19 nt, synthetic construct
  source 1..19: mol_type = other RNA
cactcaccccattcctcac

SEQ ID NO: 6647 - RNA, 19 nt, synthetic construct
  source 1..19: mol_type = other RNA
acactcaccccattcctca

SEQ ID NO: 6648 - RNA, 19 nt, synthetic construct
  source 1..19: mol_type = other RNA
cacactcaccccattcctc

SEQ ID NO: 6649 - RNA, 19 nt, synthetic construct
  source 1..19: mol_type = other RNA
ccacactcaccccattcct

SEQ ID NO: 6650 - RNA, 19 nt, synthetic construct
  source 1..19: mol_type = other RNA
gccacactcaccccattcc

SEQ ID NO: 6651 - RNA, 19 nt, synthetic construct
  source 1..19: mol_type = other RNA
agccacactcaccccattc

SEQ ID NO: 6652 - RNA, 19 nt, synthetic construct
  source 1..19: mol_type = other RNA
aagccacactcaccccatt

SEQ ID NO: 6653 - RNA, 19 nt, synthetic construct
  source 1..19: mol_type = other RNA
aaagccacactcaccccat

SEQ ID NO: 6654 - RNA, 19 nt, synthetic construct
  source 1..19: mol_type = other RNA
taaagccacactcacccca

SEQ ID NO: 6655 - RNA, 19 nt, synthetic construct
  source 1..19: mol_type = other RNA
ctaaagccacactcacccc

SEQ ID NO: 6656 - RNA, 19 nt, synthetic construct
  source 1..19: mol_type = other RNA
tctaaagccacactcaccc

SEQ ID NO: 6657 - RNA, 19 nt, synthetic construct
  source 1..19: mol_type = other RNA
gtctaaagccacactcacc

SEQ ID NO: 6658 - RNA, 19 nt, synthetic construct
  source 1..19: mol_type = other RNA
ggtctaaagccacactcac

SEQ ID NO: 6659 - RNA, 19 nt, synthetic construct
  source 1..19: mol_type = other RNA
gggtctaaagccacactca

SEQ ID NO: 6660 - RNA, 19 nt, synthetic construct
  source 1..19: mol_type = other RNA
tgggtctaaagccacactc

SEQ ID NO: 6661 - RNA, 19 nt, synthetic construct
  source 1..19: mol_type = other RNA
gtgggtctaaagccacact

SEQ ID NO: 6662 - RNA, 19 nt, synthetic construct
  source 1..19: mol_type = other RNA
ggtgggtctaaagccacac

SEQ ID NO: 6663 - RNA, 19 nt, synthetic construct
  source 1..19: mol_type = other RNA
tggtgggtctaaagccaca

SEQ ID NO: 6664 - RNA, 19 nt, synthetic construct
  source 1..19: mol_type = other RNA
atggtgggtctaaagccac

SEQ ID NO: 6665 - RNA, 19 nt, synthetic construct
  source 1..19: mol_type = other RNA
gatggtgggtctaaagcca

SEQ ID NO: 6666 - RNA, 19 nt, synthetic construct
  source 1..19: mol_type = other RNA
agatggtgggtctaaagcc

SEQ ID NO: 6667 - RNA, 19 nt, synthetic construct
  source 1..19: mol_type = other RNA
aagatggtgggtctaaagc

SEQ ID NO: 6668 - RNA, 19 nt, synthetic construct
  source 1..19: mol_type = other RNA
gaagatggtgggtctaaag

SEQ ID NO: 6669 - RNA, 19 nt, synthetic construct
  source 1..19: mol_type = other RNA
tgaagatggtgggtctaaa

SEQ ID NO: 6670 - RNA, 19 nt, synthetic construct
  source 1..19: mol_type = other RNA
ctgaagatggtgggtctaa

SEQ ID NO: 6671 - RNA, 19 nt, synthetic construct
  source 1..19: mol_type = other RNA
tctgaagatggtgggtcta

SEQ ID NO: 6672 - RNA, 19 nt, synthetic construct
  source 1..19: mol_type = other RNA
atctgaagatggtgggtct

SEQ ID NO: 6673 - RNA, 19 nt, synthetic construct
  source 1..19: mol_type = other RNA
gatctgaagatggtgggtc

SEQ ID NO: 6674 - RNA, 19 nt, synthetic construct
  source 1..19: mol_type = other RNA
agatctgaagatggtgggt

SEQ ID NO: 6675 - RNA, 19 nt, synthetic construct
  source 1..19: mol_type = other RNA
cagatctgaagatggtggg

SEQ ID NO: 6676 - RNA, 19 nt, synthetic construct
  source 1..19: mol_type = other RNA
gcagatctgaagatggtgg

SEQ ID NO: 6677 - RNA, 19 nt, synthetic construct
  source 1..19: mol_type = other RNA
tgcagatctgaagatggtg

SEQ ID NO: 6678 - RNA, 19 nt, synthetic construct
  source 1..19: mol_type = other RNA
ttgcagatctgaagatggt

SEQ ID NO: 6679 - RNA, 19 nt, synthetic construct
  source 1..19: mol_type = other RNA
gttgcagatctgaagatgg

SEQ ID NO: 6680 - RNA, 19 nt, synthetic construct
  source 1..19: mol_type = other RNA
agttgcagatctgaagatg

SEQ ID NO: 6681 - RNA, 19 nt, synthetic construct
  source 1..19: mol_type = other RNA
aagttgcagatctgaagat

SEQ ID NO: 6682 - RNA, 19 nt, synthetic construct
  source 1..19: mol_type = other RNA
aaagttgcagatctgaaga

SEQ ID NO: 6683 - RNA, 19 nt, synthetic construct
  source 1..19: mol_type = other RNA
taaagttgcagatctgaag

SEQ ID NO: 6684 - RNA, 19 nt, synthetic construct
  source 1..19: mol_type = other RNA
ttaaagttgcagatctgaa

SEQ ID NO: 6685 - RNA, 19 nt, synthetic construct
  source 1..19: mol_type = other RNA
tttaaagttgcagatctga

SEQ ID NO: 6686 - RNA, 19 nt, synthetic construct
  source 1..19: mol_type = other RNA
ttttaaagttgcagatctg

SEQ ID NO: 6687 - RNA, 19 nt, synthetic construct
  source 1..19: mol_type = other RNA
attttaaagttgcagatct

SEQ ID NO: 6688 - RNA, 19 nt, synthetic construct
  source 1..19: mol_type = other RNA
cattttaaagttgcagatc

SEQ ID NO: 6689 - RNA, 19 nt, synthetic construct
  source 1..19: mol_type = other RNA
ccattttaaagttgcagat

SEQ ID NO: 6690 - RNA, 19 nt, synthetic construct
  source 1..19: mol_type = other RNA
tccattttaaagttgcaga

SEQ ID NO: 6691 - RNA, 19 nt, synthetic construct
  source 1..19: mol_type = other RNA
ttccattttaaagttgcag

SEQ ID NO: 6692 - RNA, 19 nt, synthetic construct
  source 1..19: mol_type = other RNA
tttccattttaaagttgca

SEQ ID NO: 6693 - RNA, 19 nt, synthetic construct
  source 1..19: mol_type = other RNA
ctttccattttaaagttgc

SEQ ID NO: 6694 - RNA, 19 nt, synthetic construct
  source 1..19: mol_type = other RNA
tctttccattttaaagttg

SEQ ID NO: 6695 - RNA, 19 nt, synthetic construct
  source 1..19: mol_type = other RNA
ttctttccattttaaagtt

SEQ ID NO: 6696 - RNA, 19 nt, synthetic construct
  source 1..19: mol_type = other RNA
tttctttccattttaaagt

SEQ ID NO: 6697 - RNA, 19 nt, synthetic construct
  source 1..19: mol_type = other RNA
ctttctttccattttaaag

SEQ ID NO: 6698 - RNA, 19 nt, synthetic construct
  source 1..19: mol_type = other RNA
gctttctttccattttaaa

SEQ ID NO: 6699 - RNA, 19 nt, synthetic construct
  source 1..19: mol_type = other RNA
ggctttctttccattttaa

SEQ ID NO: 6700 - RNA, 19 nt, synthetic construct
  source 1..19: mol_type = other RNA
aggctttctttccatttta

SEQ ID NO: 6701 - RNA, 19 nt, synthetic construct
  source 1..19: mol_type = other RNA
taggctttctttccatttt

SEQ ID NO: 6702 - RNA, 19 nt, synthetic construct
  source 1..19: mol_type = other RNA
ttaggctttctttccattt

SEQ ID NO: 6703 - RNA, 19 nt, synthetic construct
  source 1..19: mol_type = other RNA
attaggctttctttccatt

SEQ ID NO: 6704 - RNA, 19 nt, synthetic construct
  source 1..19: mol_type = other RNA
cattaggctttctttccat

SEQ ID NO: 6705 - RNA, 19 nt, synthetic construct
  source 1..19: mol_type = other RNA
tcattaggctttctttcca

SEQ ID NO: 6706 - RNA, 19 nt, synthetic construct
  source 1..19: mol_type = other RNA
ctcattaggctttctttcc

SEQ ID NO: 6707 - RNA, 19 nt, synthetic construct
  source 1..19: mol_type = other RNA
actcattaggctttctttc

SEQ ID NO: 6708 - RNA, 19 nt, synthetic construct
  source 1..19: mol_type = other RNA
gactcattaggctttcttt

SEQ ID NO: 6709 - RNA, 19 nt, synthetic construct
  source 1..19: mol_type = other RNA
cgactcattaggctttctt

SEQ ID NO: 6710 - RNA, 19 nt, synthetic construct
  source 1..19: mol_type = other RNA
ccgactcattaggctttct

SEQ ID NO: 6711 - RNA, 19 nt, synthetic construct
  source 1..19: mol_type = other RNA
tccgactcattaggctttc

SEQ ID NO: 6712 - RNA, 19 nt, synthetic construct
  source 1..19: mol_type = other RNA
ttccgactcattaggcttt

SEQ ID NO: 6713 - RNA, 19 nt, synthetic construct
  source 1..19: mol_type = other RNA
tttccgactcattaggctt

SEQ ID NO: 6714 - RNA, 19 nt, synthetic construct
  source 1..19: mol_type = other RNA
ttttccgactcattaggct

SEQ ID NO: 6715 - RNA, 19 nt, synthetic construct
  source 1..19: mol_type = other RNA
cttttccgactcattaggc

SEQ ID NO: 6716 - RNA, 19 nt, synthetic construct
  source 1..19: mol_type = other RNA
ccttttccgactcattagg

SEQ ID NO: 6717 - RNA, 19 nt, synthetic construct
  source 1..19: mol_type = other RNA
gccttttccgactcattag

SEQ ID NO: 6718 - RNA, 19 nt, synthetic construct
  source 1..19: mol_type = other RNA
ggccttttccgactcatta

SEQ ID NO: 6719 - RNA, 19 nt, synthetic construct
  source 1..19: mol_type = other RNA
tggccttttccgactcatt

SEQ ID NO: 6720 - RNA, 19 nt, synthetic construct
  source 1..19: mol_type = other RNA
atggccttttccgactcat

SEQ ID NO: 6721 - RNA, 19 nt, synthetic construct
  source 1..19: mol_type = other RNA
aatggccttttccgactca

SEQ ID NO: 6722 - RNA, 19 nt, synthetic construct
  source 1..19: mol_type = other RNA
aaatggccttttccgactc

SEQ ID NO: 6723 - RNA, 19 nt, synthetic construct
  source 1..19: mol_type = other RNA
caaatggccttttccgact

SEQ ID NO: 6724 - RNA, 19 nt, synthetic construct
  source 1..19: mol_type = other RNA
acaaatggccttttccgac

SEQ ID NO: 6725 - RNA, 19 nt, synthetic construct
  source 1..19: mol_type = other RNA
aacaaatggccttttccga

SEQ ID NO: 6726 - RNA, 19 nt, synthetic construct
  source 1..19: mol_type = other RNA
caacaaatggccttttccg

SEQ ID NO: 6727 - RNA, 19 nt, synthetic construct
  source 1..19: mol_type = other RNA
ccaacaaatggccttttcc

SEQ ID NO: 6728 - RNA, 19 nt, synthetic construct
  source 1..19: mol_type = other RNA
tccaacaaatggccttttc

SEQ ID NO: 6729 - RNA, 19 nt, synthetic construct
  source 1..19: mol_type = other RNA
ttccaacaaatggcctttt

SEQ ID NO: 6730 - RNA, 19 nt, synthetic construct
  source 1..19: mol_type = other RNA
cttccaacaaatggccttt

SEQ ID NO: 6731 - RNA, 19 nt, synthetic construct
  source 1..19: mol_type = other RNA
tcttccaacaaatggcctt

SEQ ID NO: 6732 - RNA, 19 nt, synthetic construct
  source 1..19: mol_type = other RNA
atcttccaacaaatggcct

SEQ ID NO: 6733 - RNA, 19 nt, synthetic construct
  source 1..19: mol_type = other RNA
catcttccaacaaatggcc

SEQ ID NO: 6734 - RNA, 19 nt, synthetic construct
  source 1..19: mol_type = other RNA
acatcttccaacaaatggc

SEQ ID NO: 6735 - RNA, 19 nt, synthetic construct
  source 1..19: mol_type = other RNA
aacatcttccaacaaatgg

SEQ ID NO: 6736 - RNA, 19 nt, synthetic construct
  source 1..19: mol_type = other RNA
caacatcttccaacaaatg

SEQ ID NO: 6737 - RNA, 19 nt, synthetic construct
  source 1..19: mol_type = other RNA
acaacatcttccaacaaat

SEQ ID NO: 6738 - RNA, 19 nt, synthetic construct
  source 1..19: mol_type = other RNA
aacaacatcttccaacaaa

SEQ ID NO: 6739 - RNA, 19 nt, synthetic construct
  source 1..19: mol_type = other RNA
taacaacatcttccaacaa

SEQ ID NO: 6740 - RNA, 19 nt, synthetic construct
  source 1..19: mol_type = other RNA
gtaacaacatcttccaaca

SEQ ID NO: 6741 - RNA, 19 nt, synthetic construct
  source 1..19: mol_type = other RNA
agtaacaacatcttccaac

SEQ ID NO: 6742 - RNA, 19 nt, synthetic construct
  source 1..19: mol_type = other RNA
gagtaacaacatcttccaa

SEQ ID NO: 6743 - RNA, 19 nt, synthetic construct
  source 1..19: mol_type = other RNA
ggagtaacaacatcttcca

SEQ ID NO: 6744 - RNA, 19 nt, synthetic construct
  source 1..19: mol_type = other RNA
aggagtaacaacatcttcc

SEQ ID NO: 6745 - RNA, 19 nt, synthetic construct
  source 1..19: mol_type = other RNA
caggagtaacaacatcttc

SEQ ID NO: 6746 - RNA, 19 nt, synthetic construct
  source 1..19: mol_type = other RNA
gcaggagtaacaacatctt

SEQ ID NO: 6747 - RNA, 19 nt, synthetic construct
  source 1..19: mol_type = other RNA
tgcaggagtaacaacatct

SEQ ID NO: 6748 - RNA, 19 nt, synthetic construct
  source 1..19: mol_type = other RNA
gtgcaggagtaacaacatc

SEQ ID NO: 6749 - RNA, 19 nt, synthetic construct
  source 1..19: mol_type = other RNA
agtgcaggagtaacaacat

SEQ ID NO: 6750 - RNA, 19 nt, synthetic construct
  source 1..19: mol_type = other RNA
gagtgcaggagtaacaaca

SEQ ID NO: 6751 - RNA, 19 nt, synthetic construct
  source 1..19: mol_type = other RNA
ggagtgcaggagtaacaac

SEQ ID NO: 6752 - RNA, 19 nt, synthetic construct
  source 1..19: mol_type = other RNA
gggagtgcaggagtaacaa

SEQ ID NO: 6753 - RNA, 19 nt, synthetic construct
  source 1..19: mol_type = other RNA
ggggagtgcaggagtaaca

SEQ ID NO: 6754 - RNA, 19 nt, synthetic construct
  source 1..19: mol_type = other RNA
tggggagtgcaggagtaac

SEQ ID NO: 6755 - RNA, 19 nt, synthetic construct
  source 1..19: mol_type = other RNA
ctggggagtgcaggagtaa

SEQ ID NO: 6756 - RNA, 19 nt, synthetic construct
  source 1..19: mol_type = other RNA
tctggggagtgcaggagta

SEQ ID NO: 6757 - RNA, 19 nt, synthetic construct
  source 1..19: mol_type = other RNA
ctctggggagtgcaggagt

SEQ ID NO: 6758 - RNA, 19 nt, synthetic construct
  source 1..19: mol_type = other RNA
gctctggggagtgcaggag

SEQ ID NO: 6759 - RNA, 19 nt, synthetic construct
  source 1..19: mol_type = other RNA
agctctggggagtgcagga

SEQ ID NO: 6760 - RNA, 19 nt, synthetic construct
  source 1..19: mol_type = other RNA
cagctctggggagtgcagg

SEQ ID NO: 6761 - RNA, 19 nt, synthetic construct
  source 1..19: mol_type = other RNA
ccagctctggggagtgcag

SEQ ID NO: 6762 - RNA, 19 nt, synthetic construct
  source 1..19: mol_type = other RNA
cccagctctggggagtgca

SEQ ID NO: 6763 - RNA, 19 nt, synthetic construct
  source 1..19: mol_type = other RNA
tcccagctctggggagtgc

SEQ ID NO: 6764 - RNA, 19 nt, synthetic construct
  source 1..19: mol_type = other RNA
gtcccagctctggggagtg

SEQ ID NO: 6765 - RNA, 19 nt, synthetic construct
  source 1..19: mol_type = other RNA
tgtcccagctctggggagt

SEQ ID NO: 6766 - RNA, 19 nt, synthetic construct
  source 1..19: mol_type = other RNA
ttgtcccagctctggggag

SEQ ID NO: 6767 - RNA, 19 nt, synthetic construct
  source 1..19: mol_type = other RNA
tttgtcccagctctgggga

SEQ ID NO: 6768 - RNA, 19 nt, synthetic construct
  source 1..19: mol_type = other RNA
atttgtcccagctctgggg

SEQ ID NO: 6769 - RNA, 19 nt, synthetic construct
  source 1..19: mol_type = other RNA
aatttgtcccagctctggg

SEQ ID NO: 6770 - RNA, 19 nt, synthetic construct
  source 1..19: mol_type = other RNA
aaatttgtcccagctctgg

SEQ ID NO: 6771 - RNA, 19 nt, synthetic construct
  source 1..19: mol_type = other RNA
aaaatttgtcccagctctg

SEQ ID NO: 6772 - RNA, 19 nt, synthetic construct
  source 1..19: mol_type = other RNA
aaaaatttgtcccagctct

SEQ ID NO: 6773 - RNA, 19 nt, synthetic construct
  source 1..19: mol_type = other RNA
gaaaaatttgtcccagctc

SEQ ID NO: 6774 - RNA, 19 nt, synthetic construct
  source 1..19: mol_type = other RNA
tgaaaaatttgtcccagct

SEQ ID NO: 6775 - RNA, 19 nt, synthetic construct
  source 1..19: mol_type = other RNA
ttgaaaaatttgtcccagc

SEQ ID NO: 6776 - RNA, 19 nt, synthetic construct
  source 1..19: mol_type = other RNA
gttgaaaaatttgtcccag

SEQ ID NO: 6777 - RNA, 19 nt, synthetic construct
  source 1..19: mol_type = other RNA
ggttgaaaaatttgtccca

SEQ ID NO: 6778 - RNA, 19 nt, synthetic construct
  source 1..19: mol_type = other RNA
gggttgaaaaatttgtccc

SEQ ID NO: 6779 - RNA, 19 nt, synthetic construct
  source 1..19: mol_type = other RNA
ggggttgaaaaatttgtcc

SEQ ID NO: 6780 - RNA, 19 nt, synthetic construct
  source 1..19: mol_type = other RNA
tggggttgaaaaatttgtc

SEQ ID NO: 6781 - RNA, 19 nt, synthetic construct
  source 1..19: mol_type = other RNA
ctggggttgaaaaatttgt

SEQ ID NO: 6782 - RNA, 19 nt, synthetic construct
  source 1..19: mol_type = other RNA
actggggttgaaaaatttg

SEQ ID NO: 6783 - RNA, 19 nt, synthetic construct
  source 1..19: mol_type = other RNA
tactggggttgaaaaattt

SEQ ID NO: 6784 - RNA, 19 nt, synthetic construct
  source 1..19: mol_type = other RNA
atactggggttgaaaaatt

SEQ ID NO: 6785 - RNA, 19 nt, synthetic construct
  source 1..19: mol_type = other RNA
gatactggggttgaaaaat

SEQ ID NO: 6786 - RNA, 19 nt, synthetic construct
  source 1..19: mol_type = other RNA
ggatactggggttgaaaaa

SEQ ID NO: 6787 - RNA, 19 nt, synthetic construct
  source 1..19: mol_type = other RNA
gggatactggggttgaaaa

SEQ ID NO: 6788 - RNA, 19 nt, synthetic construct
  source 1..19: mol_type = other RNA
cgggatactggggttgaaa

SEQ ID NO: 6789 - RNA, 19 nt, synthetic construct
  source 1..19: mol_type = other RNA
acgggatactggggttgaa

SEQ ID NO: 6790 - RNA, 19 nt, synthetic construct
  source 1..19: mol_type = other RNA
gacgggatactggggttga

SEQ ID NO: 6791 - RNA, 19 nt, synthetic construct
  source 1..19: mol_type = other RNA
agacgggatactggggttg

SEQ ID NO: 6792 - RNA, 19 nt, synthetic construct
  source 1..19: mol_type = other RNA
aagacgggatactggggtt

SEQ ID NO: 6793 - RNA, 19 nt, synthetic construct
  source 1..19: mol_type = other RNA
aaagacgggatactggggt

SEQ ID NO: 6794 - RNA, 19 nt, synthetic construct
  source 1..19: mol_type = other RNA
caaagacgggatactgggg

SEQ ID NO: 6795 - RNA, 19 nt, synthetic construct
  source 1..19: mol_type = other RNA
ccaaagacgggatactggg

SEQ ID NO: 6796 - RNA, 19 nt, synthetic construct
  source 1..19: mol_type = other RNA
cccaaagacgggatactgg

SEQ ID NO: 6797 - RNA, 19 nt, synthetic construct
  source 1..19: mol_type = other RNA
acccaaagacgggatactg

SEQ ID NO: 6798 - RNA, 19 nt, synthetic construct
  source 1..19: mol_type = other RNA
aacccaaagacgggatact

SEQ ID NO: 6799 - RNA, 19 nt, synthetic construct
  source 1..19: mol_type = other RNA
aaacccaaagacgggatac

SEQ ID NO: 6800 - RNA, 19 nt, synthetic construct
  source 1..19: mol_type = other RNA
caaacccaaagacgggata

SEQ ID NO: 6801 - RNA, 19 nt, synthetic construct
  source 1..19: mol_type = other RNA
gcaaacccaaagacgggat

SEQ ID NO: 6802 - RNA, 19 nt, synthetic construct
  source 1..19: mol_type = other RNA
cgcaaacccaaagacggga

SEQ ID NO: 6803 - RNA, 19 nt, synthetic construct
  source 1..19: mol_type = other RNA
ccgcaaacccaaagacggg

SEQ ID NO: 6804 - RNA, 19 nt, synthetic construct
  source 1..19: mol_type = other RNA
tccgcaaacccaaagacgg

SEQ ID NO: 6805 - RNA, 19 nt, synthetic construct
  source 1..19: mol_type = other RNA
ttccgcaaacccaaagacg

SEQ ID NO: 6806 - RNA, 19 nt, synthetic construct
  source 1..19: mol_type = other RNA
attccgcaaacccaaagac

SEQ ID NO: 6807 - RNA, 19 nt, synthetic construct
  source 1..19: mol_type = other RNA
cattccgcaaacccaaaga

SEQ ID NO: 6808 - RNA, 19 nt, synthetic construct
  source 1..19: mol_type = other RNA
acattccgcaaacccaaag

SEQ ID NO: 6809 - RNA, 19 nt, synthetic construct
  source 1..19: mol_type = other RNA
aacattccgcaaacccaaa

SEQ ID NO: 6810 - RNA, 19 nt, synthetic construct
  source 1..19: mol_type = other RNA
taacattccgcaaacccaa

SEQ ID NO: 6811 - RNA, 19 nt, synthetic construct
  source 1..19: mol_type = other RNA
ataacattccgcaaaccca

SEQ ID NO: 6812 - RNA, 19 nt, synthetic construct
  source 1..19: mol_type = other RNA
aataacattccgcaaaccc

SEQ ID NO: 6813 - RNA, 19 nt, synthetic construct
  source 1..19: mol_type = other RNA
aaataacattccgcaaacc

SEQ ID NO: 6814 - RNA, 19 nt, synthetic construct
  source 1..19: mol_type = other RNA
taaataacattccgcaaac

SEQ ID NO: 6815 - RNA, 19 nt, synthetic construct
  source 1..19: mol_type = other RNA
ataaataacattccgcaaa

SEQ ID NO: 6816 - RNA, 19 nt, synthetic construct
  source 1..19: mol_type = other RNA
tataaataacattccgcaa

SEQ ID NO: 6817 - RNA, 19 nt, synthetic construct
  source 1..19: mol_type = other RNA
atataaataacattccgca

SEQ ID NO: 6818 - RNA, 19 nt, synthetic construct
  source 1..19: mol_type = other RNA
gatataaataacattccgc

SEQ ID NO: 6819 - RNA, 19 nt, synthetic construct
  source 1..19: mol_type = other RNA
tgatataaataacattccg

SEQ ID NO: 6820 - RNA, 19 nt, synthetic construct
  source 1..19: mol_type = other RNA
ttgatataaataacattcc

SEQ ID NO: 6821 - RNA, 19 nt, synthetic construct
  source 1..19: mol_type = other RNA
attgatataaataacattc

SEQ ID NO: 6822 - RNA, 19 nt, synthetic construct
  source 1..19: mol_type = other RNA
cattgatataaataacatt

SEQ ID NO: 6823 - RNA, 19 nt, synthetic construct
  source 1..19: mol_type = other RNA
tcattgatataaataacat

SEQ ID NO: 6824 - RNA, 19 nt, synthetic construct
  source 1..19: mol_type = other RNA
ttcattgatataaataaca

SEQ ID NO: 6825 - RNA, 19 nt, synthetic construct
  source 1..19: mol_type = other RNA
tttcattgatataaataac

SEQ ID NO: 6826 - RNA, 19 nt, synthetic construct
  source 1..19: mol_type = other RNA
gtttcattgatataaataa

SEQ ID NO: 6827 - RNA, 19 nt, synthetic construct
  source 1..19: mol_type = other RNA
agtttcattgatataaata

SEQ ID NO: 6828 - RNA, 19 nt, synthetic construct
  source 1..19: mol_type = other RNA
gagtttcattgatataaat

SEQ ID NO: 6829 - RNA, 19 nt, synthetic construct
  source 1..19: mol_type = other RNA
tgagtttcattgatataaa

SEQ ID NO: 6830 - RNA, 19 nt, synthetic construct
  source 1..19: mol_type = other RNA
gtgagtttcattgatataa

SEQ ID NO: 6831 - RNA, 19 nt, synthetic construct
  source 1..19: mol_type = other RNA
tgtgagtttcattgatata

SEQ ID NO: 6832 - RNA, 19 nt, synthetic construct
  source 1..19: mol_type = other RNA
gtgtgagtttcattgatat

SEQ ID NO: 6833 - RNA, 19 nt, synthetic construct
  source 1..19: mol_type = other RNA
tgtgtgagtttcattgata

SEQ ID NO: 6834 - RNA, 19 nt, synthetic construct
  source 1..19: mol_type = other RNA
ttgtgtgagtttcattgat

SEQ ID NO: 6835 - RNA, 19 nt, synthetic construct
  source 1..19: mol_type = other RNA
cttgtgtgagtttcattga

SEQ ID NO: 6836 - RNA, 19 nt, synthetic construct
  source 1..19: mol_type = other RNA
tcttgtgtgagtttcattg

SEQ ID NO: 6837 - RNA, 19 nt, synthetic construct
  source 1..19: mol_type = other RNA
gtcttgtgtgagtttcatt

SEQ ID NO: 6838 - RNA, 19 nt, synthetic construct
  source 1..19: mol_type = other RNA
tgtcttgtgtgagtttcat

SEQ ID NO: 6839 - RNA, 19 nt, synthetic construct
  source 1..19: mol_type = other RNA
gtgtcttgtgtgagtttca

SEQ ID NO: 6840 - RNA, 19 nt, synthetic construct
  source 1..19: mol_type = other RNA
ggtgtcttgtgtgagtttc

SEQ ID NO: 6841 - RNA, 19 nt, synthetic construct
  source 1..19: mol_type = other RNA
cggtgtcttgtgtgagttt

SEQ ID NO: 6842 - RNA, 19 nt, synthetic construct
  source 1..19: mol_type = other RNA
gcggtgtcttgtgtgagtt

SEQ ID NO: 6843 - RNA, 19 nt, synthetic construct
  source 1..19: mol_type = other RNA
cgcggtgtcttgtgtgagt

SEQ ID NO: 6844 - RNA, 19 nt, synthetic construct
  source 1..19: mol_type = other RNA
ccgcggtgtcttgtgtgag

SEQ ID NO: 6845 - RNA, 19 nt, synthetic construct
  source 1..19: mol_type = other RNA
tccgcggtgtcttgtgtga

SEQ ID NO: 6846 - RNA, 19 nt, synthetic construct
  source 1..19: mol_type = other RNA
atccgcggtgtcttgtgtg

SEQ ID NO: 6847 - RNA, 19 nt, synthetic construct
  source 1..19: mol_type = other RNA
catccgcggtgtcttgtgt

SEQ ID NO: 6848 - RNA, 19 nt, synthetic construct
  source 1..19: mol_type = other RNA
ccatccgcggtgtcttgtg

SEQ ID NO: 6849 - RNA, 19 nt, synthetic construct
  source 1..19: mol_type = other RNA
gccatccgcggtgtcttgt

SEQ ID NO: 6850 - RNA, 19 nt, synthetic construct
  source 1..19: mol_type = other RNA
agccatccgcggtgtcttg

SEQ ID NO: 6851 - RNA, 19 nt, synthetic construct
  source 1..19: mol_type = other RNA
aagccatccgcggtgtctt

SEQ ID NO: 6852 - RNA, 19 nt, synthetic construct
  source 1..19: mol_type = other RNA
caagccatccgcggtgtct

SEQ ID NO: 6853 - RNA, 19 nt, synthetic construct
  source 1..19: mol_type = other RNA
gcaagccatccgcggtgtc

SEQ ID NO: 6854 - RNA, 19 nt, synthetic construct
  source 1..19: mol_type = other RNA
tgcaagccatccgcggtgt

SEQ ID NO: 6855 - RNA, 19 nt, synthetic construct
  source 1..19: mol_type = other RNA
ttgcaagccatccgcggtg

SEQ ID NO: 6856 - RNA, 19 nt, synthetic construct
  source 1..19: mol_type = other RNA
cttgcaagccatccgcggt

SEQ ID NO: 6857 - RNA, 19 nt, synthetic construct
  source 1..19: mol_type = other RNA
tcttgcaagccatccgcgg

SEQ ID NO: 6858 - RNA, 19 nt, synthetic construct
  source 1..19: mol_type = other RNA
gtcttgcaagccatccgcg

SEQ ID NO: 6859 - RNA, 19 nt, synthetic construct
  source 1..19: mol_type = other RNA
cgtcttgcaagccatccgc

SEQ ID NO: 6860 - RNA, 19 nt, synthetic construct
  source 1..19: mol_type = other RNA
gcgtcttgcaagccatccg

SEQ ID NO: 6861 - RNA, 19 nt, synthetic construct
  source 1..19: mol_type = other RNA
ggcgtcttgcaagccatcc

SEQ ID NO: 6862 - RNA, 19 nt, synthetic construct
  source 1..19: mol_type = other RNA
aggcgtcttgcaagccatc

SEQ ID NO: 6863 - RNA, 19 nt, synthetic construct
  source 1..19: mol_type = other RNA
aaggcgtcttgcaagccat

SEQ ID NO: 6864 - RNA, 19 nt, synthetic construct
  source 1..19: mol_type = other RNA
aaaggcgtcttgcaagcca

SEQ ID NO: 6865 - RNA, 19 nt, synthetic construct
  source 1..19: mol_type = other RNA
gaaaggcgtcttgcaagcc

SEQ ID NO: 6866 - RNA, 19 nt, synthetic construct
  source 1..19: mol_type = other RNA
agaaaggcgtcttgcaagc

SEQ ID NO: 6867 - RNA, 19 nt, synthetic construct
  source 1..19: mol_type = other RNA
aagaaaggcgtcttgcaag

SEQ ID NO: 6868 - RNA, 19 nt, synthetic construct
  source 1..19: mol_type = other RNA
taagaaaggcgtcttgcaa

SEQ ID NO: 6869 - RNA, 19 nt, synthetic construct
  source 1..19: mol_type = other RNA
gtaagaaaggcgtcttgca

SEQ ID NO: 6870 - RNA, 19 nt, synthetic construct
  source 1..19: mol_type = other RNA
cgtaagaaaggcgtcttgc

SEQ ID NO: 6871 - RNA, 19 nt, synthetic construct
  source 1..19: mol_type = other RNA
acgtaagaaaggcgtcttg

SEQ ID NO: 6872 - RNA, 19 nt, synthetic construct
  source 1..19: mol_type = other RNA
aacgtaagaaaggcgtctt

SEQ ID NO: 6873 - RNA, 19 nt, synthetic construct
  source 1..19: mol_type = other RNA
gaacgtaagaaaggcgtct

SEQ ID NO: 6874 - RNA, 19 nt, synthetic construct
  source 1..19: mol_type = other RNA
agaacgtaagaaaggcgtc

SEQ ID NO: 6875 - RNA, 19 nt, synthetic construct
  source 1..19: mol_type = other RNA
aagaacgtaagaaaggcgt

SEQ ID NO: 6876 - RNA, 19 nt, synthetic construct
  source 1..19: mol_type = other RNA
aaagaacgtaagaaaggcg

SEQ ID NO: 6877 - RNA, 19 nt, synthetic construct
  source 1..19: mol_type = other RNA
aaaagaacgtaagaaaggc

SEQ ID NO: 6878 - RNA, 19 nt, synthetic construct
  source 1..19: mol_type = other RNA
aaaaagaacgtaagaaagg

SEQ ID NO: 6879 - RNA, 19 nt, synthetic construct
  source 1..19: mol_type = other RNA
taaaaagaacgtaagaaag

SEQ ID NO: 6880 - RNA, 19 nt, synthetic construct
  source 1..19: mol_type = other RNA
ataaaaagaacgtaagaaa

SEQ ID NO: 6881 - RNA, 19 nt, synthetic construct
  source 1..19: mol_type = other RNA
aataaaaagaacgtaagaa

SEQ ID NO: 6882 - RNA, 19 nt, synthetic construct
  source 1..19: mol_type = other RNA
gaataaaaagaacgtaaga

SEQ ID NO: 6883 - RNA, 19 nt, synthetic construct
  source 1..19: mol_type = other RNA
tgaataaaaagaacgtaag

SEQ ID NO: 6884 - RNA, 19 nt, synthetic construct
  source 1..19: mol_type = other RNA
ttgaataaaaagaacgtaa

SEQ ID NO: 6885 - RNA, 19 nt, synthetic construct
  source 1..19: mol_type = other RNA
cttgaataaaaagaacgta

SEQ ID NO: 6886 - RNA, 19 nt, synthetic construct
  source 1..19: mol_type = other RNA
tcttgaataaaaagaacgt

SEQ ID NO: 6887 - RNA, 19 nt, synthetic construct
  source 1..19: mol_type = other RNA
ctcttgaataaaaagaacg

SEQ ID NO: 6888 - RNA, 19 nt, synthetic construct
  source 1..19: mol_type = other RNA
gctcttgaataaaaagaac

SEQ ID NO: 6889 - RNA, 19 nt, synthetic construct
  source 1..19: mol_type = other RNA
cgctcttgaataaaaagaa

SEQ ID NO: 6890 - RNA, 19 nt, synthetic construct
  source 1..19: mol_type = other RNA
tcgctcttgaataaaaaga

SEQ ID NO: 6891 - RNA, 19 nt, synthetic construct
  source 1..19: mol_type = other RNA
ctcgctcttgaataaaaag

SEQ ID NO: 6892 - RNA, 19 nt, synthetic construct
  source 1..19: mol_type = other RNA
tctcgctcttgaataaaaa

SEQ ID NO: 6893 - RNA, 19 nt, synthetic construct
  source 1..19: mol_type = other RNA
atctcgctcttgaataaaa

SEQ ID NO: 6894 - RNA, 19 nt, synthetic construct
  source 1..19: mol_type = other RNA
catctcgctcttgaataaa

SEQ ID NO: 6895 - RNA, 19 nt, synthetic construct
  source 1..19: mol_type = other RNA
acatctcgctcttgaataa

SEQ ID NO: 6896 - RNA, 19 nt, synthetic construct
  source 1..19: mol_type = other RNA
cacatctcgctcttgaata

SEQ ID NO: 6897 - RNA, 19 nt, synthetic construct
  source 1..19: mol_type = other RNA
gcacatctcgctcttgaat

SEQ ID NO: 6898 - RNA, 19 nt, synthetic construct
  source 1..19: mol_type = other RNA
tgcacatctcgctcttgaa

SEQ ID NO: 6899 - RNA, 19 nt, synthetic construct
  source 1..19: mol_type = other RNA
atgcacatctcgctcttga

SEQ ID NO: 6900 - RNA, 19 nt, synthetic construct
  source 1..19: mol_type = other RNA
tatgcacatctcgctcttg

SEQ ID NO: 6901 - RNA, 19 nt, synthetic construct
  source 1..19: mol_type = other RNA
ttatgcacatctcgctctt

SEQ ID NO: 6902 - RNA, 19 nt, synthetic construct
  source 1..19: mol_type = other RNA
cttatgcacatctcgctct

SEQ ID NO: 6903 - RNA, 19 nt, synthetic construct
  source 1..19: mol_type = other RNA
ccttatgcacatctcgctc

SEQ ID NO: 6904 - RNA, 19 nt, synthetic construct
  source 1..19: mol_type = other RNA
cccttatgcacatctcgct

SEQ ID NO: 6905 - RNA, 19 nt, synthetic construct
  source 1..19: mol_type = other RNA
gcccttatgcacatctcgc

SEQ ID NO: 6906 - RNA, 19 nt, synthetic construct
  source 1..19: mol_type = other RNA
tgcccttatgcacatctcg

SEQ ID NO: 6907 - RNA, 19 nt, synthetic construct
  source 1..19: mol_type = other RNA
atgcccttatgcacatctc

SEQ ID NO: 6908 - RNA, 19 nt, synthetic construct
  source 1..19: mol_type = other RNA
catgcccttatgcacatct

SEQ ID NO: 6909 - RNA, 19 nt, synthetic construct
  source 1..19: mol_type = other RNA
acatgcccttatgcacatc

SEQ ID NO: 6910 - RNA, 19 nt, synthetic construct
  source 1..19: mol_type = other RNA
aacatgcccttatgcacat

SEQ ID NO: 6911 - RNA, 19 nt, synthetic construct
  source 1..19: mol_type = other RNA
aaacatgcccttatgcaca

SEQ ID NO: 6912 - RNA, 19 nt, synthetic construct
  source 1..19: mol_type = other RNA
caaacatgcccttatgcac

SEQ ID NO: 6913 - RNA, 19 nt, synthetic construct
  source 1..19: mol_type = other RNA
gcaaacatgcccttatgca

SEQ ID NO: 6914 - RNA, 19 nt, synthetic construct
  source 1..19: mol_type = other RNA
ggcaaacatgcccttatgc

SEQ ID NO: 6915 - RNA, 19 nt, synthetic construct
  source 1..19: mol_type = other RNA
tggcaaacatgcccttatg

SEQ ID NO: 6916 - RNA, 19 nt, synthetic construct
  source 1..19: mol_type = other RNA
gtggcaaacatgcccttat

SEQ ID NO: 6917 - RNA, 19 nt, synthetic construct
  source 1..19: mol_type = other RNA
ggtggcaaacatgccctta

SEQ ID NO: 6918 - RNA, 19 nt, synthetic construct
  source 1..19: mol_type = other RNA
tggtggcaaacatgccctt

SEQ ID NO: 6919 - RNA, 19 nt, synthetic construct
  source 1..19: mol_type = other RNA
ttggtggcaaacatgccct

SEQ ID NO: 6920 - RNA, 19 nt, synthetic construct
  source 1..19: mol_type = other RNA
attggtggcaaacatgccc

SEQ ID NO: 6921 - RNA, 19 nt, synthetic construct
  source 1..19: mol_type = other RNA
cattggtggcaaacatgcc

SEQ ID NO: 6922 - RNA, 19 nt, synthetic construct
  source 1..19: mol_type = other RNA
acattggtggcaaacatgc

SEQ ID NO: 6923 - RNA, 19 nt, synthetic construct
  source 1..19: mol_type = other RNA
cacattggtggcaaacatg

SEQ ID NO: 6924 - RNA, 19 nt, synthetic construct
  source 1..19: mol_type = other RNA
tcacattggtggcaaacat

SEQ ID NO: 6925 - RNA, 19 nt, synthetic construct
  source 1..19: mol_type = other RNA
gtcacattggtggcaaaca

SEQ ID NO: 6926 - RNA, 19 nt, synthetic construct
  source 1..19: mol_type = other RNA
agtcacattggtggcaaac

SEQ ID NO: 6927 - RNA, 19 nt, synthetic construct
  source 1..19: mol_type = other RNA
cagtcacattggtggcaaa

SEQ ID NO: 6928 - RNA, 19 nt, synthetic construct
  source 1..19: mol_type = other RNA
tcagtcacattggtggcaa

SEQ ID NO: 6929 - RNA, 19 nt, synthetic construct
  source 1..19: mol_type = other RNA
ttcagtcacattggtggca

SEQ ID NO: 6930 - RNA, 19 nt, synthetic construct
  source 1..19: mol_type = other RNA
tttcagtcacattggtggc

SEQ ID NO: 6931 - RNA, 19 nt, synthetic construct
  source 1..19: mol_type = other RNA
ttttcagtcacattggtgg

SEQ ID NO: 6932 - RNA, 19 nt, synthetic construct
  source 1..19: mol_type = other RNA
attttcagtcacattggtg

SEQ ID NO: 6933 - RNA, 19 nt, synthetic construct
  source 1..19: mol_type = other RNA
cattttcagtcacattggt

SEQ ID NO: 6934 - RNA, 19 nt, synthetic construct
  source 1..19: mol_type = other RNA
acattttcagtcacattgg

SEQ ID NO: 6935 - RNA, 19 nt, synthetic construct
  source 1..19: mol_type = other RNA
cacattttcagtcacattg

SEQ ID NO: 6936 - RNA, 19 nt, synthetic construct
  source 1..19: mol_type = other RNA
gcacattttcagtcacatt

SEQ ID NO: 6937 - RNA, 19 nt, synthetic construct
  source 1..19: mol_type = other RNA
agcacattttcagtcacat

SEQ ID NO: 6938 - RNA, 19 nt, synthetic construct
  source 1..19: mol_type = other RNA
cagcacattttcagtcaca

SEQ ID NO: 6939 - RNA, 19 nt, synthetic construct
  source 1..19: mol_type = other RNA
tcagcacattttcagtcac

SEQ ID NO: 6940 - RNA, 19 nt, synthetic construct
  source 1..19: mol_type = other RNA
ttcagcacattttcagtca

SEQ ID NO: 6941 - RNA, 19 nt, synthetic construct
  source 1..19: mol_type = other RNA
gttcagcacattttcagtc

SEQ ID NO: 6942 - RNA, 19 nt, synthetic construct
  source 1..19: mol_type = other RNA
tgttcagcacattttcagt

SEQ ID NO: 6943 - RNA, 19 nt, synthetic construct
  source 1..19: mol_type = other RNA
ctgttcagcacattttcag

SEQ ID NO: 6944 - RNA, 19 nt, synthetic construct
  source 1..19: mol_type = other RNA
gctgttcagcacattttca

SEQ ID NO: 6945 - RNA, 19 nt, synthetic construct
  source 1..19: mol_type = other RNA
tgctgttcagcacattttc

SEQ ID NO: 6946 - RNA, 19 nt, synthetic construct
  source 1..19: mol_type = other RNA
ctgctgttcagcacatttt

SEQ ID NO: 6947 - RNA, 19 nt, synthetic construct
  source 1..19: mol_type = other RNA
actgctgttcagcacattt

SEQ ID NO: 6948 - RNA, 19 nt, synthetic construct
  source 1..19: mol_type = other RNA
tactgctgttcagcacatt

SEQ ID NO: 6949 - RNA, 19 nt, synthetic construct
  source 1..19: mol_type = other RNA
ctactgctgttcagcacat

SEQ ID NO: 6950 - RNA, 19 nt, synthetic construct
  source 1..19: mol_type = other RNA
tctactgctgttcagcaca

SEQ ID NO: 6951 - RNA, 19 nt, synthetic construct
  source 1..19: mol_type = other RNA
ctctactgctgttcagcac

SEQ ID NO: 6952 - RNA, 19 nt, synthetic construct
  source 1..19: mol_type = other RNA
actctactgctgttcagca

SEQ ID NO: 6953 - RNA, 19 nt, synthetic construct
  source 1..19: mol_type = other RNA
tactctactgctgttcagc

SEQ ID NO: 6954 - RNA, 19 nt, synthetic construct
  source 1..19: mol_type = other RNA
gtactctactgctgttcag

SEQ ID NO: 6955 - RNA, 19 nt, synthetic construct
  source 1..19: mol_type = other RNA
tgtactctactgctgttca

SEQ ID NO: 6956 - RNA, 19 nt, synthetic construct
  source 1..19: mol_type = other RNA
ttgtactctactgctgttc

SEQ ID NO: 6957 - RNA, 19 nt, synthetic construct
  source 1..19: mol_type = other RNA
cttgtactctactgctgtt

SEQ ID NO: 6958 - RNA, 19 nt, synthetic construct
  source 1..19: mol_type = other RNA
tcttgtactctactgctgt

SEQ ID NO: 6959 - RNA, 19 nt, synthetic construct
  source 1..19: mol_type = other RNA
ctcttgtactctactgctg

SEQ ID NO: 6960 - RNA, 19 nt, synthetic construct
  source 1..19: mol_type = other RNA
cctcttgtactctactgct

SEQ ID NO: 6961 - RNA, 19 nt, synthetic construct
  source 1..19: mol_type = other RNA
gcctcttgtactctactgc

SEQ ID NO: 6962 - RNA, 19 nt, synthetic construct
  source 1..19: mol_type = other RNA
tgcctcttgtactctactg

SEQ ID NO: 6963 - RNA, 19 nt, synthetic construct
  source 1..19: mol_type = other RNA
ttgcctcttgtactctact

SEQ ID NO: 6964 - RNA, 19 nt, synthetic construct
  source 1..19: mol_type = other RNA
attgcctcttgtactctac

SEQ ID NO: 6965 - RNA, 19 nt, synthetic construct
  source 1..19: mol_type = other RNA
aattgcctcttgtactcta

SEQ ID NO: 6966 - RNA, 19 nt, synthetic construct
  source 1..19: mol_type = other RNA
caattgcctcttgtactct

SEQ ID NO: 6967 - RNA, 19 nt, synthetic construct
  source 1..19: mol_type = other RNA
gcaattgcctcttgtactc

SEQ ID NO: 6968 - RNA, 19 nt, synthetic construct
  source 1..19: mol_type = other RNA
tgcaattgcctcttgtact

SEQ ID NO: 6969 - RNA, 19 nt, synthetic construct
  source 1..19: mol_type = other RNA
ctgcaattgcctcttgtac

SEQ ID NO: 6970 - RNA, 19 nt, synthetic construct
  source 1..19: mol_type = other RNA
tctgcaattgcctcttgta

SEQ ID NO: 6971 - RNA, 19 nt, synthetic construct
  source 1..19: mol_type = other RNA
ttctgcaattgcctcttgt

SEQ ID NO: 6972 - RNA, 19 nt, synthetic construct
  source 1..19: mol_type = other RNA
cttctgcaattgcctcttg

SEQ ID NO: 6973 - RNA, 19 nt, synthetic construct
  source 1..19: mol_type = other RNA
acttctgcaattgcctctt

SEQ ID NO: 6974 - RNA, 19 nt, synthetic construct
  source 1..19: mol_type = other RNA
cacttctgcaattgcctct

SEQ ID NO: 6975 - RNA, 19 nt, synthetic construct
  source 1..19: mol_type = other RNA
ccacttctgcaattgcctc

SEQ ID NO: 6976 - RNA, 19 nt, synthetic construct
  source 1..19: mol_type = other RNA
gccacttctgcaattgcct

SEQ ID NO: 6977 - RNA, 19 nt, synthetic construct
  source 1..19: mol_type = other RNA
agccacttctgcaattgcc

SEQ ID NO: 6978 - RNA, 19 nt, synthetic construct
  source 1..19: mol_type = other RNA
cagccacttctgcaattgc

SEQ ID NO: 6979 - RNA, 19 nt, synthetic construct
  source 1..19: mol_type = other RNA
gcagccacttctgcaattg

SEQ ID NO: 6980 - RNA, 19 nt, synthetic construct
  source 1..19: mol_type = other RNA
agcagccacttctgcaatt

SEQ ID NO: 6981 - RNA, 19 nt, synthetic construct
  source 1..19: mol_type = other RNA
cagcagccacttctgcaat

SEQ ID NO: 6982 - RNA, 19 nt, synthetic construct
  source 1..19: mol_type = other RNA
tcagcagccacttctgcaa

SEQ ID NO: 6983 - RNA, 19 nt, synthetic construct
  source 1..19: mol_type = other RNA
ttcagcagccacttctgca

SEQ ID NO: 6984 - RNA, 19 nt, synthetic construct
  source 1..19: mol_type = other RNA
attcagcagccacttctgc

SEQ ID NO: 6985 - RNA, 19 nt, synthetic construct
  source 1..19: mol_type = other RNA
aattcagcagccacttctg

SEQ ID NO: 6986 - RNA, 19 nt, synthetic construct
  source 1..19: mol_type = other RNA
taattcagcagccacttct

SEQ ID NO: 6987 - RNA, 19 nt, synthetic construct
  source 1..19: mol_type = other RNA
ttaattcagcagccacttc

SEQ ID NO: 6988 - RNA, 19 nt, synthetic construct
  source 1..19: mol_type = other RNA
tttaattcagcagccactt

SEQ ID NO: 6989 - RNA, 19 nt, synthetic construct
  source 1..19: mol_type = other RNA
gtttaattcagcagccact

SEQ ID NO: 6990 - RNA, 19 nt, synthetic construct
  source 1..19: mol_type = other RNA
ggtttaattcagcagccac

SEQ ID NO: 6991 - RNA, 19 nt, synthetic construct
  source 1..19: mol_type = other RNA
gggtttaattcagcagcca

SEQ ID NO: 6992 - RNA, 19 nt, synthetic construct
  source 1..19: mol_type = other RNA
agggtttaattcagcagcc

SEQ ID NO: 6993 - RNA, 19 nt, synthetic construct
  source 1..19: mol_type = other RNA
cagggtttaattcagcagc

SEQ ID NO: 6994 - RNA, 19 nt, synthetic construct
  source 1..19: mol_type = other RNA
tcagggtttaattcagcag

SEQ ID NO: 6995 - RNA, 19 nt, synthetic construct
  source 1..19: mol_type = other RNA
atcagggtttaattcagca

SEQ ID NO: 6996 - RNA, 19 nt, synthetic construct
  source 1..19: mol_type = other RNA
catcagggtttaattcagc

SEQ ID NO: 6997 - RNA, 19 nt, synthetic construct
  source 1..19: mol_type = other RNA
ccatcagggtttaattcag

SEQ ID NO: 6998 - RNA, 19 nt, synthetic construct
  source 1..19: mol_type = other RNA
accatcagggtttaattca

SEQ ID NO: 6999 - RNA, 19 nt, synthetic construct
  source 1..19: mol_type = other RNA
aaccatcagggtttaattc

SEQ ID NO: 7000 - RNA, 19 nt, synthetic construct
  source 1..19: mol_type = other RNA
gaaccatcagggtttaatt

SEQ ID NO: 7001 - RNA, 19 nt, synthetic construct
  source 1..19: mol_type = other RNA
agaaccatcagggtttaat

SEQ ID NO: 7002 - RNA, 19 nt, synthetic construct
  source 1..19: mol_type = other RNA
cagaaccatcagggtttaa

SEQ ID NO: 7003 - RNA, 19 nt, synthetic construct
  source 1..19: mol_type = other RNA
gcagaaccatcagggttta

SEQ ID NO: 7004 - RNA, 19 nt, synthetic construct
  source 1..19: mol_type = other RNA
ggcagaaccatcagggttt

SEQ ID NO: 7005 - RNA, 19 nt, synthetic construct
  source 1..19: mol_type = other RNA
gggcagaaccatcagggtt

SEQ ID NO: 7006 - RNA, 19 nt, synthetic construct
  source 1..19: mol_type = other RNA
tgggcagaaccatcagggt

SEQ ID NO: 7007 - RNA, 19 nt, synthetic construct
  source 1..19: mol_type = other RNA
ctgggcagaaccatcaggg

SEQ ID NO: 7008 - RNA, 19 nt, synthetic construct
  source 1..19: mol_type = other RNA
gctgggcagaaccatcagg

SEQ ID NO: 7009 - RNA, 19 nt, synthetic construct
  source 1..19: mol_type = other RNA
tgctgggcagaaccatcag

SEQ ID NO: 7010 - RNA, 19 nt, synthetic construct
  source 1..19: mol_type = other RNA
ctgctgggcagaaccatca

SEQ ID NO: 7011 - RNA, 19 nt, synthetic construct
  source 1..19: mol_type = other RNA
gctgctgggcagaaccatc

SEQ ID NO: 7012 - RNA, 19 nt, synthetic construct
  source 1..19: mol_type = other RNA
tgctgctgggcagaaccat

SEQ ID NO: 7013 - RNA, 19 nt, synthetic construct
  source 1..19: mol_type = other RNA
ttgctgctgggcagaacca

SEQ ID NO: 7014 - RNA, 19 nt, synthetic construct
  source 1..19: mol_type = other RNA
attgctgctgggcagaacc

SEQ ID NO: 7015 - RNA, 19 nt, synthetic construct
  source 1..19: mol_type = other RNA
gattgctgctgggcagaac

SEQ ID NO: 7016 - RNA, 19 nt, synthetic construct
  source 1..19: mol_type = other RNA
tgattgctgctgggcagaa

SEQ ID NO: 7017 - RNA, 19 nt, synthetic construct
  source 1..19: mol_type = other RNA
ttgattgctgctgggcaga

SEQ ID NO: 7018 - RNA, 19 nt, synthetic construct
  source 1..19: mol_type = other RNA
tttgattgctgctgggcag

SEQ ID NO: 7019 - RNA, 19 nt, synthetic construct
  source 1..19: mol_type = other RNA
ttttgattgctgctgggca

SEQ ID NO: 7020 - RNA, 19 nt, synthetic construct
  source 1..19: mol_type = other RNA
cttttgattgctgctgggc

SEQ ID NO: 7021 - RNA, 19 nt, synthetic construct
  source 1..19: mol_type = other RNA
gcttttgattgctgctggg

SEQ ID NO: 7022 - RNA, 19 nt, synthetic construct
  source 1..19: mol_type = other RNA
ggcttttgattgctgctgg

SEQ ID NO: 7023 - RNA, 19 nt, synthetic construct
  source 1..19: mol_type = other RNA
cggcttttgattgctgctg

SEQ ID NO: 7024 - RNA, 19 nt, synthetic construct
  source 1..19: mol_type = other RNA
acggcttttgattgctgct

SEQ ID NO: 7025 - RNA, 19 nt, synthetic construct
  source 1..19: mol_type = other RNA
aacggcttttgattgctgc

SEQ ID NO: 7026 - RNA, 19 nt, synthetic construct
  source 1..19: mol_type = other RNA
taacggcttttgattgctg

SEQ ID NO: 7027 - RNA, 19 nt, synthetic construct
  source 1..19: mol_type = other RNA
ttaacggcttttgattgct

SEQ ID NO: 7028 - RNA, 19 nt, synthetic construct
  source 1..19: mol_type = other RNA
gttaacggcttttgattgc

SEQ ID NO: 7029 - RNA, 19 nt, synthetic construct
  source 1..19: mol_type = other RNA
tgttaacggcttttgattg

SEQ ID NO: 7030 - RNA, 19 nt, synthetic construct
  source 1..19: mol_type = other RNA
ttgttaacggcttttgatt

SEQ ID NO: 7031 - RNA, 19 nt, synthetic construct
  source 1..19: mol_type = other RNA
tttgttaacggcttttgat

SEQ ID NO: 7032 - RNA, 19 nt, synthetic construct
  source 1..19: mol_type = other RNA
ctttgttaacggcttttga

SEQ ID NO: 7033 - RNA, 19 nt, synthetic construct
  source 1..19: mol_type = other RNA
actttgttaacggcttttg

SEQ ID NO: 7034 - RNA, 19 nt, synthetic construct
  source 1..19: mol_type = other RNA
cactttgttaacggctttt

SEQ ID NO: 7035 - RNA, 19 nt, synthetic construct
  source 1..19: mol_type = other RNA
tcactttgttaacggcttt

SEQ ID NO: 7036 - RNA, 19 nt, synthetic construct
  source 1..19: mol_type = other RNA
ttcactttgttaacggctt

SEQ ID NO: 7037 - RNA, 19 nt, synthetic construct
  source 1..19: mol_type = other RNA
tttcactttgttaacggct

SEQ ID NO: 7038 - RNA, 19 nt, synthetic construct
  source 1..19: mol_type = other RNA
ttttcactttgttaacggc

SEQ ID NO: 7039 - RNA, 19 nt, synthetic construct
  source 1..19: mol_type = other RNA
tttttcactttgttaacgg

SEQ ID NO: 7040 - RNA, 19 nt, synthetic construct
  source 1..19: mol_type = other RNA
ctttttcactttgttaacg

SEQ ID NO: 7041 - RNA, 19 nt, synthetic construct
  source 1..19: mol_type = other RNA
tctttttcactttgttaac

SEQ ID NO: 7042 - RNA, 19 nt, synthetic construct
  source 1..19: mol_type = other RNA
ttctttttcactttgttaa

SEQ ID NO: 7043 - RNA, 19 nt, synthetic construct
  source 1..19: mol_type = other RNA
tttctttttcactttgtta

SEQ ID NO: 7044 - RNA, 19 nt, synthetic construct
  source 1..19: mol_type = other RNA
ctttctttttcactttgtt

SEQ ID NO: 7045 - RNA, 19 nt, synthetic construct
  source 1..19: mol_type = other RNA
gctttctttttcactttgt

SEQ ID NO: 7046 - RNA, 19 nt, synthetic construct
  source 1..19: mol_type = other RNA
agctttctttttcactttg

SEQ ID NO: 7047 - RNA, 19 nt, synthetic construct
  source 1..19: mol_type = other RNA
tagctttctttttcacttt

SEQ ID NO: 7048 - RNA, 19 nt, synthetic construct
  source 1..19: mol_type = other RNA
ttagctttctttttcactt

SEQ ID NO: 7049 - RNA, 19 nt, synthetic construct
  source 1..19: mol_type = other RNA
tttagctttctttttcact

SEQ ID NO: 7050 - RNA, 19 nt, synthetic construct
  source 1..19: mol_type = other RNA
ttttagctttctttttcac

SEQ ID NO: 7051 - RNA, 19 nt, synthetic construct
  source 1..19: mol_type = other RNA
cttttagctttctttttca

SEQ ID NO: 7052 - RNA, 19 nt, synthetic construct
  source 1..19: mol_type = other RNA
ccttttagctttctttttc

SEQ ID NO: 7053 - RNA, 19 nt, synthetic construct
  source 1..19: mol_type = other RNA
tccttttagctttcttttt

SEQ ID NO: 7054 - RNA, 19 nt, synthetic construct
  source 1..19: mol_type = other RNA
atccttttagctttctttt

SEQ ID NO: 7055 - RNA, 19 nt, synthetic construct
  source 1..19: mol_type = other RNA
aatccttttagctttcttt

SEQ ID NO: 7056 - RNA, 19 nt, synthetic construct
  source 1..19: mol_type = other RNA
gaatccttttagctttctt

SEQ ID NO: 7057 - RNA, 19 nt, synthetic construct
  source 1..19: mol_type = other RNA
agaatccttttagctttct

SEQ ID NO: 7058 - RNA, 19 nt, synthetic construct
  source 1..19: mol_type = other RNA
aagaatccttttagctttc

SEQ ID NO: 7059 - RNA, 19 nt, synthetic construct
  source 1..19: mol_type = other RNA
gaagaatccttttagcttt

SEQ ID NO: 7060 - RNA, 19 nt, synthetic construct
  source 1..19: mol_type = other RNA
tgaagaatccttttagctt

SEQ ID NO: 7061 - RNA, 19 nt, synthetic construct
  source 1..19: mol_type = other RNA
ttgaagaatccttttagct

SEQ ID NO: 7062 - RNA, 19 nt, synthetic construct
  source 1..19: mol_type = other RNA
cttgaagaatccttttagc

SEQ ID NO: 7063 - RNA, 19 nt, synthetic construct
  source 1..19: mol_type = other RNA
tcttgaagaatccttttag

SEQ ID NO: 7064 - RNA, 19 nt, synthetic construct
  source 1..19: mol_type = other RNA
ttcttgaagaatcctttta

SEQ ID NO: 7065 - RNA, 19 nt, synthetic construct
  source 1..19: mol_type = other RNA
tttcttgaagaatcctttt

SEQ ID NO: 7066 - RNA, 19 nt, synthetic construct
  source 1..19: mol_type = other RNA
atttcttgaagaatccttt

SEQ ID NO: 7067 - RNA, 19 nt, synthetic construct
  source 1..19: mol_type = other RNA
catttcttgaagaatcctt

SEQ ID NO: 7068 - RNA, 19 nt, synthetic construct
  source 1..19: mol_type = other RNA
ccatttcttgaagaatcct

SEQ ID NO: 7069 - RNA, 19 nt, synthetic construct
  source 1..19: mol_type = other RNA
accatttcttgaagaatcc

SEQ ID NO: 7070 - RNA, 19 nt, synthetic construct
  source 1..19: mol_type = other RNA
aaccatttcttgaagaatc

SEQ ID NO: 7071 - RNA, 19 nt, synthetic construct
  source 1..19: mol_type = other RNA
caaccatttcttgaagaat

SEQ ID NO: 7072 - RNA, 19 nt, synthetic construct
  source 1..19: mol_type = other RNA
gcaaccatttcttgaagaa

SEQ ID NO: 7073 - RNA, 19 nt, synthetic construct
  source 1..19: mol_type = other RNA
ggcaaccatttcttgaaga

SEQ ID NO: 7074 - RNA, 19 nt, synthetic construct
  source 1..19: mol_type = other RNA
tggcaaccatttcttgaag

SEQ ID NO: 7075 - RNA, 19 nt, synthetic construct
  source 1..19: mol_type = other RNA
gtggcaaccatttcttgaa

SEQ ID NO: 7076 - RNA, 19 nt, synthetic construct
  source 1..19: mol_type = other RNA
agtggcaaccatttcttga

SEQ ID NO: 7077 - RNA, 19 nt, synthetic construct
  source 1..19: mol_type = other RNA
cagtggcaaccatttcttg

SEQ ID NO: 7078 - RNA, 19 nt, synthetic construct
  source 1..19: mol_type = other RNA
acagtggcaaccatttctt

SEQ ID NO: 7079 - RNA, 19 nt, synthetic construct
  source 1..19: mol_type = other RNA
gacagtggcaaccatttct

SEQ ID NO: 7080 - RNA, 19 nt, synthetic construct
  source 1..19: mol_type = other RNA
agacagtggcaaccatttc

SEQ ID NO: 7081 - RNA, 19 nt, synthetic construct
  source 1..19: mol_type = other RNA
gagacagtggcaaccattt

SEQ ID NO: 7082 - RNA, 19 nt, synthetic construct
  source 1..19: mol_type = other RNA
tgagacagtggcaaccatt

SEQ ID NO: 7083 - RNA, 19 nt, synthetic construct
  source 1..19: mol_type = other RNA
gtgagacagtggcaaccat

SEQ ID NO: 7084 - RNA, 19 nt, synthetic construct
  source 1..19: mol_type = other RNA
ggtgagacagtggcaacca

SEQ ID NO: 7085 - RNA, 19 nt, synthetic construct
  source 1..19: mol_type = other RNA
cggtgagacagtggcaacc

SEQ ID NO: 7086 - RNA, 19 nt, synthetic construct
  source 1..19: mol_type = other RNA
ccggtgagacagtggcaac

SEQ ID NO: 7087 - RNA, 19 nt, synthetic construct
  source 1..19: mol_type = other RNA
gccggtgagacagtggcaa

SEQ ID NO: 7088 - RNA, 19 nt, synthetic construct
  source 1..19: mol_type = other RNA
tgccggtgagacagtggca

SEQ ID NO: 7089 - RNA, 19 nt, synthetic construct
  source 1..19: mol_type = other RNA
ttgccggtgagacagtggc

SEQ ID NO: 7090 - RNA, 19 nt, synthetic construct
  source 1..19: mol_type = other RNA
attgccggtgagacagtgg

SEQ ID NO: 7091 - RNA, 19 nt, synthetic construct
  source 1..19: mol_type = other RNA
cattgccggtgagacagtg

SEQ ID NO: 7092 - RNA, 19 nt, synthetic construct
  source 1..19: mol_type = other RNA
tcattgccggtgagacagt

SEQ ID NO: 7093 - RNA, 19 nt, synthetic construct
  source 1..19: mol_type = other RNA
atcattgccggtgagacag

SEQ ID NO: 7094 - RNA, 19 nt, synthetic construct
  source 1..19: mol_type = other RNA
gatcattgccggtgagaca

SEQ ID NO: 7095 - RNA, 19 nt, synthetic construct
  source 1..19: mol_type = other RNA
tgatcattgccggtgagac

SEQ ID NO: 7096 - RNA, 19 nt, synthetic construct
  source 1..19: mol_type = other RNA
ctgatcattgccggtgaga

SEQ ID NO: 7097 - RNA, 19 nt, synthetic construct
  source 1..19: mol_type = other RNA
tctgatcattgccggtgag

SEQ ID NO: 7098 - RNA, 19 nt, synthetic construct
  source 1..19: mol_type = other RNA
gtctgatcattgccggtga

SEQ ID NO: 7099 - RNA, 19 nt, synthetic construct
  source 1..19: mol_type = other RNA
agtctgatcattgccggtg

SEQ ID NO: 7100 - RNA, 19 nt, synthetic construct
  source 1..19: mol_type = other RNA
cagtctgatcattgccggt

SEQ ID NO: 7101 - RNA, 19 nt, synthetic construct
  source 1..19: mol_type = other RNA
tcagtctgatcattgccgg

SEQ ID NO: 7102 - RNA, 19 nt, synthetic construct
  source 1..19: mol_type = other RNA
gtcagtctgatcattgccg

SEQ ID NO: 7103 - RNA, 19 nt, synthetic construct
  source 1..19: mol_type = other RNA
agtcagtctgatcattgcc

SEQ ID NO: 7104 - RNA, 19 nt, synthetic construct
  source 1..19: mol_type = other RNA
cagtcagtctgatcattgc

SEQ ID NO: 7105 - RNA, 19 nt, synthetic construct
  source 1..19: mol_type = other RNA
ccagtcagtctgatcattg

SEQ ID NO: 7106 - RNA, 19 nt, synthetic construct
  source 1..19: mol_type = other RNA
cccagtcagtctgatcatt

SEQ ID NO: 7107 - RNA, 19 nt, synthetic construct
  source 1..19: mol_type = other RNA
acccagtcagtctgatcat

SEQ ID NO: 7108 - RNA, 19 nt, synthetic construct
  source 1..19: mol_type = other RNA
cacccagtcagtctgatca

SEQ ID NO: 7109 - RNA, 19 nt, synthetic construct
  source 1..19: mol_type = other RNA
ccacccagtcagtctgatc

SEQ ID NO: 7110 - RNA, 19 nt, synthetic construct
  source 1..19: mol_type = other RNA
cccacccagtcagtctgat

SEQ ID NO: 7111 - RNA, 19 nt, synthetic construct
  source 1..19: mol_type = other RNA
acccacccagtcagtctga

SEQ ID NO: 7112 - RNA, 19 nt, synthetic construct
  source 1..19: mol_type = other RNA
cacccacccagtcagtctg

SEQ ID NO: 7113 - RNA, 19 nt, synthetic construct
  source 1..19: mol_type = other RNA
gcacccacccagtcagtct

SEQ ID NO: 7114 - RNA, 19 nt, synthetic construct
  source 1..19: mol_type = other RNA
agcacccacccagtcagtc

SEQ ID NO: 7115 - RNA, 19 nt, synthetic construct
  source 1..19: mol_type = other RNA
cagcacccacccagtcagt

SEQ ID NO: 7116 - RNA, 19 nt, synthetic construct
  source 1..19: mol_type = other RNA
gcagcacccacccagtcag

SEQ ID NO: 7117 - RNA, 19 nt, synthetic construct
  source 1..19: mol_type = other RNA
agcagcacccacccagtca

SEQ ID NO: 7118 - RNA, 19 nt, synthetic construct
  source 1..19: mol_type = other RNA
tagcagcacccacccagtc

SEQ ID NO: 7119 - RNA, 19 nt, synthetic construct
  source 1..19: mol_type = other RNA
ttagcagcacccacccagt

SEQ ID NO: 7120 - RNA, 19 nt, synthetic construct
  source 1..19: mol_type = other RNA
tttagcagcacccacccag

SEQ ID NO: 7121 - RNA, 19 nt, synthetic construct
  source 1..19: mol_type = other RNA
ttttagcagcacccaccca

SEQ ID NO: 7122 - RNA, 19 nt, synthetic construct
  source 1..19: mol_type = other RNA
gttttagcagcacccaccc

SEQ ID NO: 7123 - RNA, 19 nt, synthetic construct
  source 1..19: mol_type = other RNA
agttttagcagcacccacc

SEQ ID NO: 7124 - RNA, 19 nt, synthetic construct
  source 1..19: mol_type = other RNA
cagttttagcagcacccac

SEQ ID NO: 7125 - RNA, 19 nt, synthetic construct
  source 1..19: mol_type = other RNA
acagttttagcagcaccca

SEQ ID NO: 7126 - RNA, 19 nt, synthetic construct
  source 1..19: mol_type = other RNA
aacagttttagcagcaccc

SEQ ID NO: 7127 - RNA, 19 nt, synthetic construct
  source 1..19: mol_type = other RNA
gaacagttttagcagcacc

SEQ ID NO: 7128 - RNA, 19 nt, synthetic construct
  source 1..19: mol_type = other RNA
tgaacagttttagcagcac

SEQ ID NO: 7129 - RNA, 19 nt, synthetic construct
  source 1..19: mol_type = other RNA
ttgaacagttttagcagca

SEQ ID NO: 7130 - RNA, 19 nt, synthetic construct
  source 1..19: mol_type = other RNA
gttgaacagttttagcagc

SEQ ID NO: 7131 - RNA, 19 nt, synthetic construct
  source 1..19: mol_type = other RNA
tgttgaacagttttagcag

SEQ ID NO: 7132 - RNA, 19 nt, synthetic construct
  source 1..19: mol_type = other RNA
ctgttgaacagttttagca

SEQ ID NO: 7133 - RNA, 19 nt, synthetic construct
  source 1..19: mol_type = other RNA
gctgttgaacagttttagc

SEQ ID NO: 7134 - RNA, 19 nt, synthetic construct
  source 1..19: mol_type = other RNA
agctgttgaacagttttag

SEQ ID NO: 7135 - RNA, 19 nt, synthetic construct
  source 1..19: mol_type = other RNA
aagctgttgaacagtttta

SEQ ID NO: 7136 - RNA, 19 nt, synthetic construct
  source 1..19: mol_type = other RNA
gaagctgttgaacagtttt

SEQ ID NO: 7137 - RNA, 19 nt, synthetic construct
  source 1..19: mol_type = other RNA
agaagctgttgaacagttt

SEQ ID NO: 7138 - RNA, 19 nt, synthetic construct
  source 1..19: mol_type = other RNA
aagaagctgttgaacagtt

SEQ ID NO: 7139 - RNA, 19 nt, synthetic construct
  source 1..19: mol_type = other RNA
aaagaagctgttgaacagt

SEQ ID NO: 7140 - RNA, 19 nt, synthetic construct
  source 1..19: mol_type = other RNA
aaaagaagctgttgaacag

SEQ ID NO: 7141 - RNA, 19 nt, synthetic construct
  source 1..19: mol_type = other RNA
caaaagaagctgttgaaca

SEQ ID NO: 7142 - RNA, 19 nt, synthetic construct
  source 1..19: mol_type = other RNA
ccaaaagaagctgttgaac

SEQ ID NO: 7143 - RNA, 19 nt, synthetic construct
  source 1..19: mol_type = other RNA
tccaaaagaagctgttgaa

SEQ ID NO: 7144 - RNA, 19 nt, synthetic construct
  source 1..19: mol_type = other RNA
ttccaaaagaagctgttga

SEQ ID NO: 7145 - RNA, 19 nt, synthetic construct
  source 1..19: mol_type = other RNA
gttccaaaagaagctgttg

SEQ ID NO: 7146 - RNA, 19 nt, synthetic construct
  source 1..19: mol_type = other RNA
tgttccaaaagaagctgtt

SEQ ID NO: 7147 - RNA, 19 nt, synthetic construct
  source 1..19: mol_type = other RNA
atgttccaaaagaagctgt

SEQ ID NO: 7148 - RNA, 19 nt, synthetic construct
  source 1..19: mol_type = other RNA
aatgttccaaaagaagctg

SEQ ID NO: 7149 - RNA, 19 nt, synthetic construct
  source 1..19: mol_type = other RNA
gaatgttccaaaagaagct

SEQ ID NO: 7150 - RNA, 19 nt, synthetic construct
  source 1..19: mol_type = other RNA
tgaatgttccaaaagaagc

SEQ ID NO: 7151 - RNA, 19 nt, synthetic construct
  source 1..19: mol_type = other RNA
ttgaatgttccaaaagaag

SEQ ID NO: 7152 - RNA, 19 nt, synthetic construct
  source 1..19: mol_type = other RNA
tttgaatgttccaaaagaa

SEQ ID NO: 7153 - RNA, 19 nt, synthetic construct
  source 1..19: mol_type = other RNA
atttgaatgttccaaaaga

SEQ ID NO: 7154 - RNA, 19 nt, synthetic construct
  source 1..19: mol_type = other RNA
aatttgaatgttccaaaag

SEQ ID NO: 7155 - RNA, 19 nt, synthetic construct
  source 1..19: mol_type = other RNA
gaatttgaatgttccaaaa

SEQ ID NO: 7156 - RNA, 19 nt, synthetic construct
  source 1..19: mol_type = other RNA
tgaatttgaatgttccaaa

SEQ ID NO: 7157 - RNA, 19 nt, synthetic construct
  source 1..19: mol_type = other RNA
gtgaatttgaatgttccaa

SEQ ID NO: 7158 - RNA, 19 nt, synthetic construct
  source 1..19: mol_type = other RNA
tgtgaatttgaatgttcca

SEQ ID NO: 7159 - RNA, 19 nt, synthetic construct
  source 1..19: mol_type = other RNA
ttgtgaatttgaatgttcc

SEQ ID NO: 7160 - RNA, 19 nt, synthetic construct
  source 1..19: mol_type = other RNA
tttgtgaatttgaatgttc

SEQ ID NO: 7161 - RNA, 19 nt, synthetic construct
  source 1..19: mol_type = other RNA
ctttgtgaatttgaatgtt

SEQ ID NO: 7162 - RNA, 19 nt, synthetic construct
  source 1..19: mol_type = other RNA
cctttgtgaatttgaatgt

SEQ ID NO: 7163 - RNA, 19 nt, synthetic construct
  source 1..19: mol_type = other RNA
acctttgtgaatttgaatg

SEQ ID NO: 7164 - RNA, 19 nt, synthetic construct
  source 1..19: mol_type = other RNA
gacctttgtgaatttgaat

SEQ ID NO: 7165 - RNA, 19 nt, synthetic construct
  source 1..19: mol_type = other RNA
tgacctttgtgaatttgaa

SEQ ID NO: 7166 - RNA, 19 nt, synthetic construct
  source 1..19: mol_type = other RNA
ttgacctttgtgaatttga

SEQ ID NO: 7167 - RNA, 19 nt, synthetic construct
  source 1..19: mol_type = other RNA
gttgacctttgtgaatttg

SEQ ID NO: 7168 - RNA, 19 nt, synthetic construct
  source 1..19: mol_type = other RNA
agttgacctttgtgaattt

SEQ ID NO: 7169 - RNA, 19 nt, synthetic construct
  source 1..19: mol_type = other RNA
aagttgacctttgtgaatt

SEQ ID NO: 7170 - RNA, 19 nt, synthetic construct
  source 1..19: mol_type = other RNA
caagttgacctttgtgaat

SEQ ID NO: 7171 - RNA, 19 nt, synthetic construct
  source 1..19: mol_type = other RNA
tcaagttgacctttgtgaa

SEQ ID NO: 7172 - RNA, 19 nt, synthetic construct
  source 1..19: mol_type = other RNA
ctcaagttgacctttgtga

SEQ ID NO: 7173 - RNA, 19 nt, synthetic construct
  source 1..19: mol_type = other RNA
tctcaagttgacctttgtg

SEQ ID NO: 7174 - RNA, 19 nt, synthetic construct
  source 1..19: mol_type = other RNA
atctcaagttgacctttgt

SEQ ID NO: 7175 - RNA, 19 nt, synthetic construct
  source 1..19: mol_type = other RNA
catctcaagttgacctttg

SEQ ID NO: 7176 - RNA, 19 nt, synthetic construct
  source 1..19: mol_type = other RNA
ccatctcaagttgaccttt

SEQ ID NO: 7177 - RNA, 19 nt, synthetic construct
  source 1..19: mol_type = other RNA
accatctcaagttgacctt

SEQ ID NO: 7178 - RNA, 19 nt, synthetic construct
  source 1..19: mol_type = other RNA
aaccatctcaagttgacct

SEQ ID NO: 7179 - RNA, 19 nt, synthetic construct
  source 1..19: mol_type = other RNA
taaccatctcaagttgacc

SEQ ID NO: 7180 - RNA, 19 nt, synthetic construct
  source 1..19: mol_type = other RNA
ttaaccatctcaagttgac

SEQ ID NO: 7181 - RNA, 19 nt, synthetic construct
  source 1..19: mol_type = other RNA
tttaaccatctcaagttga

SEQ ID NO: 7182 - RNA, 19 nt, synthetic construct
  source 1..19: mol_type = other RNA
ctttaaccatctcaagttg

SEQ ID NO: 7183 - RNA, 19 nt, synthetic construct
  source 1..19: mol_type = other RNA
gctttaaccatctcaagtt

SEQ ID NO: 7184 - RNA, 19 nt, synthetic construct
  source 1..19: mol_type = other RNA
agctttaaccatctcaagt

SEQ ID NO: 7185 - RNA, 19 nt, synthetic construct
  source 1..19: mol_type = other RNA
cagctttaaccatctcaag

SEQ ID NO: 7186 - RNA, 19 nt, synthetic construct
  source 1..19: mol_type = other RNA
gcagctttaaccatctcaa

SEQ ID NO: 7187 - RNA, 19 nt, synthetic construct
  source 1..19: mol_type = other RNA
tgcagctttaaccatctca

SEQ ID NO: 7188 - RNA, 19 nt, synthetic construct
  source 1..19: mol_type = other RNA
ttgcagctttaaccatctc

SEQ ID NO: 7189 - RNA, 19 nt, synthetic construct
  source 1..19: mol_type = other RNA
gttgcagctttaaccatct

SEQ ID NO: 7190 - RNA, 19 nt, synthetic construct
  source 1..19: mol_type = other RNA
agttgcagctttaaccatc

SEQ ID NO: 7191 - RNA, 19 nt, synthetic construct
  source 1..19: mol_type = other RNA
cagttgcagctttaaccat

SEQ ID NO: 7192 - RNA, 19 nt, synthetic construct
  source 1..19: mol_type = other RNA
tcagttgcagctttaacca

SEQ ID NO: 7193 - RNA, 19 nt, synthetic construct
  source 1..19: mol_type = other RNA
ctcagttgcagctttaacc

SEQ ID NO: 7194 - RNA, 19 nt, synthetic construct
  source 1..19: mol_type = other RNA
tctcagttgcagctttaac

SEQ ID NO: 7195 - RNA, 19 nt, synthetic construct
  source 1..19: mol_type = other RNA
gtctcagttgcagctttaa

SEQ ID NO: 7196 - RNA, 19 nt, synthetic construct
  source 1..19: mol_type = other RNA
cgtctcagttgcagcttta

SEQ ID NO: 7197 - RNA, 19 nt, synthetic construct
  source 1..19: mol_type = other RNA
tcgtctcagttgcagcttt

SEQ ID NO: 7198 - RNA, 19 nt, synthetic construct
  source 1..19: mol_type = other RNA
ttcgtctcagttgcagctt

SEQ ID NO: 7199 - RNA, 19 nt, synthetic construct
  source 1..19: mol_type = other RNA
attcgtctcagttgcagct

SEQ ID NO: 7200 - RNA, 19 nt, synthetic construct
  source 1..19: mol_type = other RNA
aattcgtctcagttgcagc

SEQ ID NO: 7201 - RNA, 19 nt, synthetic construct
  source 1..19: mol_type = other RNA
aaattcgtctcagttgcag

SEQ ID NO: 7202 - RNA, 19 nt, synthetic construct
  source 1..19: mol_type = other RNA
caaattcgtctcagttgca

SEQ ID NO: 7203 - RNA, 19 nt, synthetic construct
  source 1..19: mol_type = other RNA
gcaaattcgtctcagttgc

SEQ ID NO: 7204 - RNA, 19 nt, synthetic construct
  source 1..19: mol_type = other RNA
ggcaaattcgtctcagttg

SEQ ID NO: 7205 - RNA, 19 nt, synthetic construct
  source 1..19: mol_type = other RNA
cggcaaattcgtctcagtt

SEQ ID NO: 7206 - RNA, 19 nt, synthetic construct
  source 1..19: mol_type = other RNA
gcggcaaattcgtctcagt

SEQ ID NO: 7207 - RNA, 19 nt, synthetic construct
  source 1..19: mol_type = other RNA
agcggcaaattcgtctcag

SEQ ID NO: 7208 - RNA, 19 nt, synthetic construct
  source 1..19: mol_type = other RNA
aagcggcaaattcgtctca

SEQ ID NO: 7209 - RNA, 19 nt, synthetic construct
  source 1..19: mol_type = other RNA
gaagcggcaaattcgtctc

SEQ ID NO: 7210 - RNA, 19 nt, synthetic construct
  source 1..19: mol_type = other RNA
agaagcggcaaattcgtct

SEQ ID NO: 7211 - RNA, 19 nt, synthetic construct
  source 1..19: mol_type = other RNA
cagaagcggcaaattcgtc

SEQ ID NO: 7212 - RNA, 19 nt, synthetic construct
  source 1..19: mol_type = other RNA
acagaagcggcaaattcgt

SEQ ID NO: 7213 - RNA, 19 nt, synthetic construct
  source 1..19: mol_type = other RNA
aacagaagcggcaaattcg

SEQ ID NO: 7214 - RNA, 19 nt, synthetic construct
  source 1..19: mol_type = other RNA
aaacagaagcggcaaattc

SEQ ID NO: 7215 - RNA, 19 nt, synthetic construct
  source 1..19: mol_type = other RNA
gaaacagaagcggcaaatt

SEQ ID NO: 7216 - RNA, 19 nt, synthetic construct
  source 1..19: mol_type = other RNA
agaaacagaagcggcaaat

SEQ ID NO: 7217 - RNA, 19 nt, synthetic construct
  source 1..19: mol_type = other RNA
tagaaacagaagcggcaaa

SEQ ID NO: 7218 - RNA, 19 nt, synthetic construct
  source 1..19: mol_type = other RNA
gtagaaacagaagcggcaa

SEQ ID NO: 7219 - RNA, 19 nt, synthetic construct
  source 1..19: mol_type = other RNA
ggtagaaacagaagcggca

SEQ ID NO: 7220 - RNA, 19 nt, synthetic construct
  source 1..19: mol_type = other RNA
tggtagaaacagaagcggc

SEQ ID NO: 7221 - RNA, 19 nt, synthetic construct
  source 1..19: mol_type = other RNA
ctggtagaaacagaagcgg

SEQ ID NO: 7222 - RNA, 19 nt, synthetic construct
  source 1..19: mol_type = other RNA
actggtagaaacagaagcg

SEQ ID NO: 7223 - RNA, 19 nt, synthetic construct
  source 1..19: mol_type = other RNA
aactggtagaaacagaagc

SEQ ID NO: 7224 - RNA, 19 nt, synthetic construct
  source 1..19: mol_type = other RNA
gaactggtagaaacagaag

SEQ ID NO: 7225 - RNA, 19 nt, synthetic construct
  source 1..19: mol_type = other RNA
tgaactggtagaaacagaa

SEQ ID NO: 7226 - RNA, 19 nt, synthetic construct
  source 1..19: mol_type = other RNA
atgaactggtagaaacaga

SEQ ID NO: 7227 - RNA, 19 nt, synthetic construct
  source 1..19: mol_type = other RNA
tatgaactggtagaaacag

SEQ ID NO: 7228 - RNA, 19 nt, synthetic construct
  source 1..19: mol_type = other RNA
ctatgaactggtagaaaca

SEQ ID NO: 7229 - RNA, 19 nt, synthetic construct
  source 1..19: mol_type = other RNA
tctatgaactggtagaaac

SEQ ID NO: 7230 - RNA, 19 nt, synthetic construct
  source 1..19: mol_type = other RNA
atctatgaactggtagaaa

SEQ ID NO: 7231 - RNA, 19 nt, synthetic construct
  source 1..19: mol_type = other RNA
gatctatgaactggtagaa

SEQ ID NO: 7232 - RNA, 19 nt, synthetic construct
  source 1..19: mol_type = other RNA
ggatctatgaactggtaga

SEQ ID NO: 7233 - RNA, 19 nt, synthetic construct
  source 1..19: mol_type = other RNA
gggatctatgaactggtag

SEQ ID NO: 7234 - RNA, 19 nt, synthetic construct
  source 1..19: mol_type = other RNA
tgggatctatgaactggta

SEQ ID NO: 7235 - RNA, 19 nt, synthetic construct
  source 1..19: mol_type = other RNA
atgggatctatgaactggt

SEQ ID NO: 7236 - RNA, 19 nt, synthetic construct
  source 1..19: mol_type = other RNA
tatgggatctatgaactgg

SEQ ID NO: 7237 - RNA, 19 nt, synthetic construct
  source 1..19: mol_type = other RNA
atatgggatctatgaactg

SEQ ID NO: 7238 - RNA, 19 nt, synthetic construct
  source 1..19: mol_type = other RNA
aatatgggatctatgaact

SEQ ID NO: 7239 - RNA, 19 nt, synthetic construct
  source 1..19: mol_type = other RNA
caatatgggatctatgaac

SEQ ID NO: 7240 - RNA, 19 nt, synthetic construct
  source 1..19: mol_type = other RNA
tcaatatgggatctatgaa

SEQ ID NO: 7241 - RNA, 19 nt, synthetic construct
  source 1..19: mol_type = other RNA
gtcaatatgggatctatga

SEQ ID NO: 7242 - RNA, 19 nt, synthetic construct
  source 1..19: mol_type = other RNA
agtcaatatgggatctatg

SEQ ID NO: 7243 - RNA, 19 nt, synthetic construct
  source 1..19: mol_type = other RNA
tagtcaatatgggatctat

SEQ ID NO: 7244 - RNA, 19 nt, synthetic construct
  source 1..19: mol_type = other RNA
atagtcaatatgggatcta

SEQ ID NO: 7245 - RNA, 19 nt, synthetic construct
  source 1..19: mol_type = other RNA
gatagtcaatatgggatct

SEQ ID NO: 7246 - RNA, 19 nt, synthetic construct
  source 1..19: mol_type = other RNA
agatagtcaatatgggatc

SEQ ID NO: 7247 - RNA, 19 nt, synthetic construct
  source 1..19: mol_type = other RNA
cagatagtcaatatgggat

SEQ ID NO: 7248 - RNA, 19 nt, synthetic construct
  source 1..19: mol_type = other RNA
gcagatagtcaatatggga

SEQ ID NO: 7249 - RNA, 19 nt, synthetic construct
  source 1..19: mol_type = other RNA
agcagatagtcaatatggg

SEQ ID NO: 7250 - RNA, 19 nt, synthetic construct
  source 1..19: mol_type = other RNA
cagcagatagtcaatatgg

SEQ ID NO: 7251 - RNA, 19 nt, synthetic construct
  source 1..19: mol_type = other RNA
gcagcagatagtcaatatg

SEQ ID NO: 7252 - RNA, 19 nt, synthetic construct
  source 1..19: mol_type = other RNA
agcagcagatagtcaatat

SEQ ID NO: 7253 - RNA, 19 nt, synthetic construct
  source 1..19: mol_type = other RNA
gagcagcagatagtcaata

SEQ ID NO: 7254 - RNA, 19 nt, synthetic construct
  source 1..19: mol_type = other RNA
tgagcagcagatagtcaat

SEQ ID NO: 7255 - RNA, 19 nt, synthetic construct
  source 1..19: mol_type = other RNA
gtgagcagcagatagtcaa

SEQ ID NO: 7256 - RNA, 19 nt, synthetic construct
  source 1..19: mol_type = other RNA
agtgagcagcagatagtca

SEQ ID NO: 7257 - RNA, 19 nt, synthetic construct
  source 1..19: mol_type = other RNA
aagtgagcagcagatagtc

SEQ ID NO: 7258 - RNA, 19 nt, synthetic construct
  source 1..19: mol_type = other RNA
aaagtgagcagcagatagt

SEQ ID NO: 7259 - RNA, 19 nt, synthetic construct
  source 1..19: mol_type = other RNA
gaaagtgagcagcagatag

SEQ ID NO: 7260 - RNA, 19 nt, synthetic construct
  source 1..19: mol_type = other RNA
tgaaagtgagcagcagata

SEQ ID NO: 7261 - RNA, 19 nt, synthetic construct
  source 1..19: mol_type = other RNA
atgaaagtgagcagcagat

SEQ ID NO: 7262 - RNA, 19 nt, synthetic construct
  source 1..19: mol_type = other RNA
aatgaaagtgagcagcaga

SEQ ID NO: 7263 - RNA, 19 nt, synthetic construct
  source 1..19: mol_type = other RNA
gaatgaaagtgagcagcag

SEQ ID NO: 7264 - RNA, 19 nt, synthetic construct
  source 1..19: mol_type = other RNA
agaatgaaagtgagcagca

SEQ ID NO: 7265 - RNA, 19 nt, synthetic construct
  source 1..19: mol_type = other RNA
gagaatgaaagtgagcagc

SEQ ID NO: 7266 - RNA, 19 nt, synthetic construct
  source 1..19: mol_type = other RNA
agagaatgaaagtgagcag

SEQ ID NO: 7267 - RNA, 19 nt, synthetic construct
  source 1..19: mol_type = other RNA
aagagaatgaaagtgagca

SEQ ID NO: 7268 - RNA, 19 nt, synthetic construct
  source 1..19: mol_type = other RNA
gaagagaatgaaagtgagc

SEQ ID NO: 7269 - RNA, 19 nt, synthetic construct
  source 1..19: mol_type = other RNA
agaagagaatgaaagtgag

SEQ ID NO: 7270 - RNA, 19 nt, synthetic construct
  source 1..19: mol_type = other RNA
cagaagagaatgaaagtga

SEQ ID NO: 7271 - RNA, 19 nt, synthetic construct
  source 1..19: mol_type = other RNA
gcagaagagaatgaaagtg

SEQ ID NO: 7272 - RNA, 19 nt, synthetic construct
  source 1..19: mol_type = other RNA
ggcagaagagaatgaaagt

SEQ ID NO: 7273 - RNA, 19 nt, synthetic construct
  source 1..19: mol_type = other RNA
tggcagaagagaatgaaag

SEQ ID NO: 7274 - RNA, 19 nt, synthetic construct
  source 1..19: mol_type = other RNA
atggcagaagagaatgaaa

SEQ ID NO: 7275 - RNA, 19 nt, synthetic construct
  source 1..19: mol_type = other RNA
tatggcagaagagaatgaa

SEQ ID NO: 7276 - RNA, 19 nt, synthetic construct
  source 1..19: mol_type = other RNA
ttatggcagaagagaatga

SEQ ID NO: 7277 - RNA, 19 nt, synthetic construct
  source 1..19: mol_type = other RNA
gttatggcagaagagaatg

SEQ ID NO: 7278 - RNA, 19 nt, synthetic construct
  source 1..19: mol_type = other RNA
tgttatggcagaagagaat

SEQ ID NO: 7279 - RNA, 19 nt, synthetic construct
  source 1..19: mol_type = other RNA
atgttatggcagaagagaa

SEQ ID NO: 7280 - RNA, 19 nt, synthetic construct
  source 1..19: mol_type = other RNA
gatgttatggcagaagaga

SEQ ID NO: 7281 - RNA, 19 nt, synthetic construct
  source 1..19: mol_type = other RNA
tgatgttatggcagaagag

SEQ ID NO: 7282 - RNA, 19 nt, synthetic construct
  source 1..19: mol_type = other RNA
ttgatgttatggcagaaga

SEQ ID NO: 7283 - RNA, 19 nt, synthetic construct
  source 1..19: mol_type = other RNA
tttgatgttatggcagaag

SEQ ID NO: 7284 - RNA, 19 nt, synthetic construct
  source 1..19: mol_type = other RNA
ctttgatgttatggcagaa

SEQ ID NO: 7285 - RNA, 19 nt, synthetic construct
  source 1..19: mol_type = other RNA
gctttgatgttatggcaga

SEQ ID NO: 7286 - RNA, 19 nt, synthetic construct
  source 1..19: mol_type = other RNA
tgctttgatgttatggcag

SEQ ID NO: 7287 - RNA, 19 nt, synthetic construct
  source 1..19: mol_type = other RNA
gtgctttgatgttatggca

SEQ ID NO: 7288 - RNA, 19 nt, synthetic construct
  source 1..19: mol_type = other RNA
ggtgctttgatgttatggc

SEQ ID NO: 7289 - RNA, 19 nt, synthetic construct
  source 1..19: mol_type = other RNA
tggtgctttgatgttatgg

SEQ ID NO: 7290 - RNA, 19 nt, synthetic construct
  source 1..19: mol_type = other RNA
atggtgctttgatgttatg

SEQ ID NO: 7291 - RNA, 19 nt, synthetic construct
  source 1..19: mol_type = other RNA
tatggtgctttgatgttat

SEQ ID NO: 7292 - RNA, 19 nt, synthetic construct
  source 1..19: mol_type = other RNA
gtatggtgctttgatgtta

SEQ ID NO: 7293 - RNA, 19 nt, synthetic construct
  source 1..19: mol_type = other RNA
tgtatggtgctttgatgtt

SEQ ID NO: 7294 - RNA, 19 nt, synthetic construct
  source 1..19: mol_type = other RNA
atgtatggtgctttgatgt

SEQ ID NO: 7295 - RNA, 19 nt, synthetic construct
  source 1..19: mol_type = other RNA
aatgtatggtgctttgatg

SEQ ID NO: 7296 - RNA, 19 nt, synthetic construct
  source 1..19: mol_type = other RNA
caatgtatggtgctttgat

SEQ ID NO: 7297 - RNA, 19 nt, synthetic construct
  source 1..19: mol_type = other RNA
gcaatgtatggtgctttga

SEQ ID NO: 7298 - RNA, 19 nt, synthetic construct
  source 1..19: mol_type = other RNA
agcaatgtatggtgctttg

SEQ ID NO: 7299 - RNA, 19 nt, synthetic construct
  source 1..19: mol_type = other RNA
aagcaatgtatggtgcttt

SEQ ID NO: 7300 - RNA, 19 nt, synthetic construct
  source 1..19: mol_type = other RNA
gaagcaatgtatggtgctt

SEQ ID NO: 7301 - RNA, 19 nt, synthetic construct
  source 1..19: mol_type = other RNA
tgaagcaatgtatggtgct

SEQ ID NO: 7302 - RNA, 19 nt, synthetic construct
  source 1..19: mol_type = other RNA
ctgaagcaatgtatggtgc

SEQ ID NO: 7303 - RNA, 19 nt, synthetic construct
  source 1..19: mol_type = other RNA
cctgaagcaatgtatggtg

SEQ ID NO: 7304 - RNA, 19 nt, synthetic construct
  source 1..19: mol_type = other RNA
gcctgaagcaatgtatggt

SEQ ID NO: 7305 - RNA, 19 nt, synthetic construct
  source 1..19: mol_type = other RNA
tgcctgaagcaatgtatgg

SEQ ID NO: 7306 - RNA, 19 nt, synthetic construct
  source 1..19: mol_type = other RNA
ttgcctgaagcaatgtatg

SEQ ID NO: 7307 - RNA, 19 nt, synthetic construct
  source 1..19: mol_type = other RNA
attgcctgaagcaatgtat

SEQ ID NO: 7308 - RNA, 19 nt, synthetic construct
  source 1..19: mol_type = other RNA
tattgcctgaagcaatgta

SEQ ID NO: 7309 - RNA, 19 nt, synthetic construct
  source 1..19: mol_type = other RNA
ttattgcctgaagcaatgt

SEQ ID NO: 7310 - RNA, 19 nt, synthetic construct
  source 1..19: mol_type = other RNA
attattgcctgaagcaatg

SEQ ID NO: 7311 - RNA, 19 nt, synthetic construct
  source 1..19: mol_type = other RNA
gattattgcctgaagcaat

SEQ ID NO: 7312 - RNA, 19 nt, synthetic construct
  source 1..19: mol_type = other RNA
agattattgcctgaagcaa

SEQ ID NO: 7313 - RNA, 19 nt, synthetic construct
  source 1..19: mol_type = other RNA
gagattattgcctgaagca

SEQ ID NO: 7314 - RNA, 19 nt, synthetic construct
  source 1..19: mol_type = other RNA
tgagattattgcctgaagc

SEQ ID NO: 7315 - RNA, 19 nt, synthetic construct
  source 1..19: mol_type = other RNA
ttgagattattgcctgaag

SEQ ID NO: 7316 - RNA, 19 nt, synthetic construct
  source 1..19: mol_type = other RNA
gttgagattattgcctgaa

SEQ ID NO: 7317 - RNA, 19 nt, synthetic construct
  source 1..19: mol_type = other RNA
tgttgagattattgcctga

SEQ ID NO: 7318 - RNA, 19 nt, synthetic construct
  source 1..19: mol_type = other RNA
atgttgagattattgcctg

SEQ ID NO: 7319 - RNA, 19 nt, synthetic construct
  source 1..19: mol_type = other RNA
gatgttgagattattgcct

SEQ ID NO: 7320 - RNA, 19 nt, synthetic construct
  source 1..19: mol_type = other RNA
ggatgttgagattattgcc

SEQ ID NO: 7321 - RNA, 19 nt, synthetic construct
  source 1..19: mol_type = other RNA
gggatgttgagattattgc

SEQ ID NO: 7322 - RNA, 19 nt, synthetic construct
  source 1..19: mol_type = other RNA
tgggatgttgagattattg

SEQ ID NO: 7323 - RNA, 19 nt, synthetic construct
  source 1..19: mol_type = other RNA
ttgggatgttgagattatt

SEQ ID NO: 7324 - RNA, 19 nt, synthetic construct
  source 1..19: mol_type = other RNA
attgggatgttgagattat

SEQ ID NO: 7325 - RNA, 19 nt, synthetic construct
  source 1..19: mol_type = other RNA
gattgggatgttgagatta

SEQ ID NO: 7326 - RNA, 19 nt, synthetic construct
  source 1..19: mol_type = other RNA
agattgggatgttgagatt

SEQ ID NO: 7327 - RNA, 19 nt, synthetic construct
  source 1..19: mol_type = other RNA
aagattgggatgttgagat

SEQ ID NO: 7328 - RNA, 19 nt, synthetic construct
  source 1..19: mol_type = other RNA
gaagattgggatgttgaga

SEQ ID NO: 7329 - RNA, 19 nt, synthetic construct
  source 1..19: mol_type = other RNA
tgaagattgggatgttgag

SEQ ID NO: 7330 - RNA, 19 nt, synthetic construct
  source 1..19: mol_type = other RNA
ctgaagattgggatgttga

SEQ ID NO: 7331 - RNA, 19 nt, synthetic construct
  source 1..19: mol_type = other RNA
actgaagattgggatgttg

SEQ ID NO: 7332 - RNA, 19 nt, synthetic construct
  source 1..19: mol_type = other RNA
tactgaagattgggatgtt

SEQ ID NO: 7333 - RNA, 19 nt, synthetic construct
  source 1..19: mol_type = other RNA
gtactgaagattgggatgt

SEQ ID NO: 7334 - RNA, 19 nt, synthetic construct
  source 1..19: mol_type = other RNA
ggtactgaagattgggatg

SEQ ID NO: 7335 - RNA, 19 nt, synthetic construct
  source 1..19: mol_type = other RNA
aggtactgaagattgggat

SEQ ID NO: 7336 - RNA, 19 nt, synthetic construct
  source 1..19: mol_type = other RNA
aaggtactgaagattggga

SEQ ID NO: 7337 - RNA, 19 nt, synthetic construct
  source 1..19: mol_type = other RNA
caaggtactgaagattggg

SEQ ID NO: 7338 - RNA, 19 nt, synthetic construct
  source 1..19: mol_type = other RNA
tcaaggtactgaagattgg

SEQ ID NO: 7339 - RNA, 19 nt, synthetic construct
  source 1..19: mol_type = other RNA
atcaaggtactgaagattg

SEQ ID NO: 7340 - RNA, 19 nt, synthetic construct
  source 1..19: mol_type = other RNA
gatcaaggtactgaagatt

SEQ ID NO: 7341 - RNA, 19 nt, synthetic construct
  source 1..19: mol_type = other RNA
ggatcaaggtactgaagat

SEQ ID NO: 7342 - RNA, 19 nt, synthetic construct
  source 1..19: mol_type = other RNA
tggatcaaggtactgaaga

SEQ ID NO: 7343 - RNA, 19 nt, synthetic construct
  source 1..19: mol_type = other RNA
atggatcaaggtactgaag

SEQ ID NO: 7344 - RNA, 19 nt, synthetic construct
  source 1..19: mol_type = other RNA
tatggatcaaggtactgaa

SEQ ID NO: 7345 - RNA, 19 nt, synthetic construct
  source 1..19: mol_type = other RNA
ttatggatcaaggtactga

SEQ ID NO: 7346 - RNA, 19 nt, synthetic construct
  source 1..19: mol_type = other RNA
cttatggatcaaggtactg

SEQ ID NO: 7347 - RNA, 19 nt, synthetic construct
  source 1..19: mol_type = other RNA
gcttatggatcaaggtact

SEQ ID NO: 7348 - RNA, 19 nt, synthetic construct
  source 1..19: mol_type = other RNA
agcttatggatcaaggtac

SEQ ID NO: 7349 - RNA, 19 nt, synthetic construct
  source 1..19: mol_type = other RNA
aagcttatggatcaaggta

SEQ ID NO: 7350 - RNA, 19 nt, synthetic construct
  source 1..19: mol_type = other RNA
caagcttatggatcaaggt

SEQ ID NO: 7351 - RNA, 19 nt, synthetic construct
  source 1..19: mol_type = other RNA
ccaagcttatggatcaagg

SEQ ID NO: 7352 - RNA, 19 nt, synthetic construct
  source 1..19: mol_type = other RNA
cccaagcttatggatcaag

SEQ ID NO: 7353 - RNA, 19 nt, synthetic construct
  source 1..19: mol_type = other RNA
ccccaagcttatggatcaa

SEQ ID NO: 7354 - RNA, 19 nt, synthetic construct
  source 1..19: mol_type = other RNA
cccccaagcttatggatca

SEQ ID NO: 7355 - RNA, 19 nt, synthetic construct
  source 1..19: mol_type = other RNA
gcccccaagcttatggatc

SEQ ID NO: 7356 - RNA, 19 nt, synthetic construct
  source 1..19: mol_type = other RNA
agcccccaagcttatggat

SEQ ID NO: 7357 - RNA, 19 nt, synthetic construct
  source 1..19: mol_type = other RNA
aagcccccaagcttatgga

SEQ ID NO: 7358 - RNA, 19 nt, synthetic construct
  source 1..19: mol_type = other RNA
gaagcccccaagcttatgg

SEQ ID NO: 7359 - RNA, 19 nt, synthetic construct
  source 1..19: mol_type = other RNA
agaagcccccaagcttatg

SEQ ID NO: 7360 - RNA, 19 nt, synthetic construct
  source 1..19: mol_type = other RNA
aagaagcccccaagcttat

SEQ ID NO: 7361 - RNA, 19 nt, synthetic construct
  source 1..19: mol_type = other RNA
gaagaagcccccaagctta

SEQ ID NO: 7362 - RNA, 19 nt, synthetic construct
  source 1..19: mol_type = other RNA
tgaagaagcccccaagctt

SEQ ID NO: 7363 - RNA, 19 nt, synthetic construct
  source 1..19: mol_type = other RNA
atgaagaagcccccaagct

SEQ ID NO: 7364 - RNA, 19 nt, synthetic construct
  source 1..19: mol_type = other RNA
tatgaagaagcccccaagc

SEQ ID NO: 7365 - RNA, 19 nt, synthetic construct
  source 1..19: mol_type = other RNA
gtatgaagaagcccccaag

SEQ ID NO: 7366 - RNA, 19 nt, synthetic construct
  source 1..19: mol_type = other RNA
cgtatgaagaagcccccaa

SEQ ID NO: 7367 - RNA, 19 nt, synthetic construct
  source 1..19: mol_type = other RNA
tcgtatgaagaagccccca

SEQ ID NO: 7368 - RNA, 19 nt, synthetic construct
  source 1..19: mol_type = other RNA
gtcgtatgaagaagccccc

SEQ ID NO: 7369 - RNA, 19 nt, synthetic construct
  source 1..19: mol_type = other RNA
cgtcgtatgaagaagcccc

SEQ ID NO: 7370 - RNA, 19 nt, synthetic construct
  source 1..19: mol_type = other RNA
tcgtcgtatgaagaagccc

SEQ ID NO: 7371 - RNA, 19 nt, synthetic construct
  source 1..19: mol_type = other RNA
ttcgtcgtatgaagaagcc

SEQ ID NO: 7372 - RNA, 19 nt, synthetic construct
  source 1..19: mol_type = other RNA
cttcgtcgtatgaagaagc

SEQ ID NO: 7373 - RNA, 19 nt, synthetic construct
  source 1..19: mol_type = other RNA
ccttcgtcgtatgaagaag

SEQ ID NO: 7374 - RNA, 19 nt, synthetic construct
  source 1..19: mol_type = other RNA
gccttcgtcgtatgaagaa

SEQ ID NO: 7375 - RNA, 19 nt, synthetic construct
  source 1..19: mol_type = other RNA
agccttcgtcgtatgaaga

SEQ ID NO: 7376 - RNA, 19 nt, synthetic construct
  source 1..19: mol_type = other RNA
gagccttcgtcgtatgaag

SEQ ID NO: 7377 - RNA, 19 nt, synthetic construct
  source 1..19: mol_type = other RNA
cgagccttcgtcgtatgaa

SEQ ID NO: 7378 - RNA, 19 nt, synthetic construct
  source 1..19: mol_type = other RNA
tcgagccttcgtcgtatga

SEQ ID NO: 7379 - RNA, 19 nt, synthetic construct
  source 1..19: mol_type = other RNA
atcgagccttcgtcgtatg

SEQ ID NO: 7380 - RNA, 19 nt, synthetic construct
  source 1..19: mol_type = other RNA
catcgagccttcgtcgtat

SEQ ID NO: 7381 - RNA, 19 nt, synthetic construct
  source 1..19: mol_type = other RNA
tcatcgagccttcgtcgta

SEQ ID NO: 7382 - RNA, 19 nt, synthetic construct
  source 1..19: mol_type = other RNA
ttcatcgagccttcgtcgt

SEQ ID NO: 7383 - RNA, 19 nt, synthetic construct
  source 1..19: mol_type = other RNA
tttcatcgagccttcgtcg

SEQ ID NO: 7384 - RNA, 19 nt, synthetic construct
  source 1..19: mol_type = other RNA
gtttcatcgagccttcgtc

SEQ ID NO: 7385 - RNA, 19 nt, synthetic construct
  source 1..19: mol_type = other RNA
tgtttcatcgagccttcgt

SEQ ID NO: 7386 - RNA, 19 nt, synthetic construct
  source 1..19: mol_type = other RNA
gtgtttcatcgagccttcg

SEQ ID NO: 7387 - RNA, 19 nt, synthetic construct
  source 1..19: mol_type = other RNA
ggtgtttcatcgagccttc

SEQ ID NO: 7388 - RNA, 19 nt, synthetic construct
  source 1..19: mol_type = other RNA
tggtgtttcatcgagcctt

SEQ ID NO: 7389 - RNA, 19 nt, synthetic construct
  source 1..19: mol_type = other RNA
ctggtgtttcatcgagcct

SEQ ID NO: 7390 - RNA, 19 nt, synthetic construct
  source 1..19: mol_type = other RNA
tctggtgtttcatcgagcc

SEQ ID NO: 7391 - RNA, 19 nt, synthetic construct
  source 1..19: mol_type = other RNA
atctggtgtttcatcgagc

SEQ ID NO: 7392 - RNA, 19 nt, synthetic construct
  source 1..19: mol_type = other RNA
catctggtgtttcatcgag

SEQ ID NO: 7393 - RNA, 19 nt, synthetic construct
  source 1..19: mol_type = other RNA
ccatctggtgtttcatcga

SEQ ID NO: 7394 - RNA, 19 nt, synthetic construct
  source 1..19: mol_type = other RNA
tccatctggtgtttcatcg

SEQ ID NO: 7395 - RNA, 19 nt, synthetic construct
  source 1..19: mol_type = other RNA
gtccatctggtgtttcatc

SEQ ID NO: 7396 - RNA, 19 nt, synthetic construct
  source 1..19: mol_type = other RNA
cgtccatctggtgtttcat

SEQ ID NO: 7397 - RNA, 19 nt, synthetic construct
  source 1..19: mol_type = other RNA
ccgtccatctggtgtttca

SEQ ID NO: 7398 - RNA, 19 nt, synthetic construct
  source 1..19: mol_type = other RNA
tccgtccatctggtgtttc

SEQ ID NO: 7399 - RNA, 19 nt, synthetic construct
  source 1..19: mol_type = other RNA
ttccgtccatctggtgttt

SEQ ID NO: 7400 - RNA, 19 nt, synthetic construct
  source 1..19: mol_type = other RNA
tttccgtccatctggtgtt

SEQ ID NO: 7401 - RNA, 19 nt, synthetic construct
  source 1..19: mol_type = other RNA
ctttccgtccatctggtgt

SEQ ID NO: 7402 - RNA, 19 nt, synthetic construct
  source 1..19: mol_type = other RNA
tctttccgtccatctggtg

SEQ ID NO: 7403 - RNA, 19 nt, synthetic construct
  source 1..19: mol_type = other RNA
atctttccgtccatctggt

SEQ ID NO: 7404 - RNA, 19 nt, synthetic construct
  source 1..19: mol_type = other RNA
catctttccgtccatctgg

SEQ ID NO: 7405 - RNA, 19 nt, synthetic construct
  source 1..19: mol_type = other RNA
acatctttccgtccatctg

SEQ ID NO: 7406 - RNA, 19 nt, synthetic construct
  source 1..19: mol_type = other RNA
aacatctttccgtccatct

SEQ ID NO: 7407 - RNA, 19 nt, synthetic construct
  source 1..19: mol_type = other RNA
gaacatctttccgtccatc

SEQ ID NO: 7408 - RNA, 19 nt, synthetic construct
  source 1..19: mol_type = other RNA
agaacatctttccgtccat

SEQ ID NO: 7409 - RNA, 19 nt, synthetic construct
  source 1..19: mol_type = other RNA
gagaacatctttccgtcca

SEQ ID NO: 7410 - RNA, 19 nt, synthetic construct
  source 1..19: mol_type = other RNA
agagaacatctttccgtcc

SEQ ID NO: 7411 - RNA, 19 nt, synthetic construct
  source 1..19: mol_type = other RNA
tagagaacatctttccgtc

SEQ ID NO: 7412 - RNA, 19 nt, synthetic construct
  source 1..19: mol_type = other RNA
atagagaacatctttccgt

SEQ ID NO: 7413 - RNA, 19 nt, synthetic construct
  source 1..19: mol_type = other RNA
tatagagaacatctttccg

SEQ ID NO: 7414 - RNA, 19 nt, synthetic construct
  source 1..19: mol_type = other RNA
ctatagagaacatctttcc

SEQ ID NO: 7415 - RNA, 19 nt, synthetic construct
  source 1..19: mol_type = other RNA
tctatagagaacatctttc

SEQ ID NO: 7416 - RNA, 19 nt, synthetic construct
  source 1..19: mol_type = other RNA
ctctatagagaacatcttt

SEQ ID NO: 7417 - RNA, 19 nt, synthetic construct
  source 1..19: mol_type = other RNA
gctctatagagaacatctt

SEQ ID NO: 7418 - RNA, 19 nt, synthetic construct
  source 1..19: mol_type = other RNA
agctctatagagaacatct

SEQ ID NO: 7419 - RNA, 19 nt, synthetic construct
  source 1..19: mol_type = other RNA
aagctctatagagaacatc

SEQ ID NO: 7420 - RNA, 19 nt, synthetic construct
  source 1..19: mol_type = other RNA
aaagctctatagagaacat

SEQ ID NO: 7421 - RNA, 19 nt, synthetic construct
  source 1..19: mol_type = other RNA
caaagctctatagagaaca

SEQ ID NO: 7422 - RNA, 19 nt, synthetic construct
  source 1..19: mol_type = other RNA
gcaaagctctatagagaac

SEQ ID NO: 7423 - RNA, 19 nt, synthetic construct
  source 1..19: mol_type = other RNA
agcaaagctctatagagaa

SEQ ID NO: 7424 - RNA, 19 nt, synthetic construct
  source 1..19: mol_type = other RNA
gagcaaagctctatagaga

SEQ ID NO: 7425 - RNA, 19 nt, synthetic construct
  source 1..19: mol_type = other RNA
ggagcaaagctctatagag

SEQ ID NO: 7426 - RNA, 19 nt, synthetic construct
  source 1..19: mol_type = other RNA
tggagcaaagctctataga

SEQ ID NO: 7427 - RNA, 19 nt, synthetic construct
  source 1..19: mol_type = other RNA
atggagcaaagctctatag

SEQ ID NO: 7428 - RNA, 19 nt, synthetic construct
  source 1..19: mol_type = other RNA
catggagcaaagctctata

SEQ ID NO: 7429 - RNA, 19 nt, synthetic construct
  source 1..19: mol_type = other RNA
ccatggagcaaagctctat

SEQ ID NO: 7430 - RNA, 19 nt, synthetic construct
  source 1..19: mol_type = other RNA
cccatggagcaaagctcta

SEQ ID NO: 7431 - RNA, 19 nt, synthetic construct
  source 1..19: mol_type = other RNA
gcccatggagcaaagctct

SEQ ID NO: 7432 - RNA, 19 nt, synthetic construct
  source 1..19: mol_type = other RNA
tgcccatggagcaaagctc

SEQ ID NO: 7433 - RNA, 19 nt, synthetic construct
  source 1..19: mol_type = other RNA
atgcccatggagcaaagct

SEQ ID NO: 7434 - RNA, 19 nt, synthetic construct
  source 1..19: mol_type = other RNA
tatgcccatggagcaaagc

SEQ ID NO: 7435 - RNA, 19 nt, synthetic construct
  source 1..19: mol_type = other RNA
atatgcccatggagcaaag

SEQ ID NO: 7436 - RNA, 19 nt, synthetic construct
  source 1..19: mol_type = other RNA
tatatgcccatggagcaaa

SEQ ID NO: 7437 - RNA, 19 nt, synthetic construct
  source 1..19: mol_type = other RNA
ctatatgcccatggagcaa

SEQ ID NO: 7438 - RNA, 19 nt, synthetic construct
  source 1..19: mol_type = other RNA
actatatgcccatggagca

SEQ ID NO: 7439 - RNA, 19 nt, synthetic construct
  source 1..19: mol_type = other RNA
aactatatgcccatggagc

SEQ ID NO: 7440 - RNA, 19 nt, synthetic construct
  source 1..19: mol_type = other RNA
caactatatgcccatggag

SEQ ID NO: 7441 - RNA, 19 nt, synthetic construct
  source 1..19: mol_type = other RNA
tcaactatatgcccatgga

SEQ ID NO: 7442 - RNA, 19 nt, synthetic construct
  source 1..19: mol_type = other RNA
ttcaactatatgcccatgg

SEQ ID NO: 7443 - RNA, 19 nt, synthetic construct
  source 1..19: mol_type = other RNA
attcaactatatgcccatg

SEQ ID NO: 7444 - RNA, 19 nt, synthetic construct
  source 1..19: mol_type = other RNA
aattcaactatatgcccat

SEQ ID NO: 7445 - RNA, 19 nt, synthetic construct
  source 1..19: mol_type = other RNA
taattcaactatatgccca

SEQ ID NO: 7446 - RNA, 19 nt, synthetic construct
  source 1..19: mol_type = other RNA
gtaattcaactatatgccc

SEQ ID NO: 7447 - RNA, 19 nt, synthetic construct
  source 1..19: mol_type = other RNA
agtaattcaactatatgcc

SEQ ID NO: 7448 - RNA, 19 nt, synthetic construct
  source 1..19: mol_type = other RNA
aagtaattcaactatatgc

SEQ ID NO: 7449 - RNA, 19 nt, synthetic construct
  source 1..19: mol_type = other RNA
gaagtaattcaactatatg

SEQ ID NO: 7450 - RNA, 19 nt, synthetic construct
  source 1..19: mol_type = other RNA
cgaagtaattcaactatat

SEQ ID NO: 7451 - RNA, 19 nt, synthetic construct
  source 1..19: mol_type = other RNA
tcgaagtaattcaactata

SEQ ID NO: 7452 - RNA, 19 nt, synthetic construct
  source 1..19: mol_type = other RNA
gtcgaagtaattcaactat

SEQ ID NO: 7453 - RNA, 19 nt, synthetic construct
  source 1..19: mol_type = other RNA
tgtcgaagtaattcaacta

SEQ ID NO: 7454 - RNA, 19 nt, synthetic construct
  source 1..19: mol_type = other RNA
ctgtcgaagtaattcaact

SEQ ID NO: 7455 - RNA, 19 nt, synthetic construct
  source 1..19: mol_type = other RNA
gctgtcgaagtaattcaac

SEQ ID NO: 7456 - RNA, 19 nt, synthetic construct
  source 1..19: mol_type = other RNA
tgctgtcgaagtaattcaa

SEQ ID NO: 7457 - RNA, 19 nt, synthetic construct
  source 1..19: mol_type = other RNA
ctgctgtcgaagtaattca

SEQ ID NO: 7458 - RNA, 19 nt, synthetic construct
  source 1..19: mol_type = other RNA
gctgctgtcgaagtaattc

SEQ ID NO: 7459 - RNA, 19 nt, synthetic construct
  source 1..19: mol_type = other RNA
tgctgctgtcgaagtaatt

SEQ ID NO: 7460 - RNA, 19 nt, synthetic construct
  source 1..19: mol_type = other RNA
ttgctgctgtcgaagtaat

SEQ ID NO: 7461 - RNA, 19 nt, synthetic construct
  source 1..19: mol_type = other RNA
attgctgctgtcgaagtaa

SEQ ID NO: 7462 - RNA, 19 nt, synthetic construct
  source 1..19: mol_type = other RNA
aattgctgctgtcgaagta

SEQ ID NO: 7463 - RNA, 19 nt, synthetic construct
  source 1..19: mol_type = other RNA
gaattgctgctgtcgaagt

SEQ ID NO: 7464 - RNA, 19 nt, synthetic construct
  source 1..19: mol_type = other RNA
agaattgctgctgtcgaag

SEQ ID NO: 7465 - RNA, 19 nt, synthetic construct
  source 1..19: mol_type = other RNA
aagaattgctgctgtcgaa

SEQ ID NO: 7466 - RNA, 19 nt, synthetic construct
  source 1..19: mol_type = other RNA
caagaattgctgctgtcga

SEQ ID NO: 7467 - RNA, 19 nt, synthetic construct
  source 1..19: mol_type = other RNA
ccaagaattgctgctgtcg

SEQ ID NO: 7468 - RNA, 19 nt, synthetic construct
  source 1..19: mol_type = other RNA
tccaagaattgctgctgtc

SEQ ID NO: 7469 - RNA, 19 nt, synthetic construct
  source 1..19: mol_type = other RNA
ctccaagaattgctgctgt

SEQ ID NO: 7470 - RNA, 19 nt, synthetic construct
  source 1..19: mol_type = other RNA
tctccaagaattgctgctg

SEQ ID NO: 7471 - RNA, 19 nt, synthetic construct
  source 1..19: mol_type = other RNA
atctccaagaattgctgct

SEQ ID NO: 7472 - RNA, 19 nt, synthetic construct
  source 1..19: mol_type = other RNA
gatctccaagaattgctgc

SEQ ID NO: 7473 - RNA, 19 nt, synthetic construct
  source 1..19: mol_type = other RNA
agatctccaagaattgctg

SEQ ID NO: 7474 - RNA, 19 nt, synthetic construct
  source 1..19: mol_type = other RNA
aagatctccaagaattgct

SEQ ID NO: 7475 - RNA, 19 nt, synthetic construct
  source 1..19: mol_type = other RNA
gaagatctccaagaattgc

SEQ ID NO: 7476 - RNA, 19 nt, synthetic construct
  source 1..19: mol_type = other RNA
ggaagatctccaagaattg

SEQ ID NO: 7477 - RNA, 19 nt, synthetic construct
  source 1..19: mol_type = other RNA
aggaagatctccaagaatt

SEQ ID NO: 7478 - RNA, 19 nt, synthetic construct
  source 1..19: mol_type = other RNA
caggaagatctccaagaat

SEQ ID NO: 7479 - RNA, 19 nt, synthetic construct
  source 1..19: mol_type = other RNA
ccaggaagatctccaagaa

SEQ ID NO: 7480 - RNA, 19 nt, synthetic construct
  source 1..19: mol_type = other RNA
tccaggaagatctccaaga

SEQ ID NO: 7481 - RNA, 19 nt, synthetic construct
  source 1..19: mol_type = other RNA
ttccaggaagatctccaag

SEQ ID NO: 7482 - RNA, 19 nt, synthetic construct
  source 1..19: mol_type = other RNA
cttccaggaagatctccaa

SEQ ID NO: 7483 - RNA, 19 nt, synthetic construct
  source 1..19: mol_type = other RNA
ccttccaggaagatctcca

SEQ ID NO: 7484 - RNA, 19 nt, synthetic construct
  source 1..19: mol_type = other RNA
gccttccaggaagatctcc

SEQ ID NO: 7485 - RNA, 19 nt, synthetic construct
  source 1..19: mol_type = other RNA
tgccttccaggaagatctc

SEQ ID NO: 7486 - RNA, 19 nt, synthetic construct
  source 1..19: mol_type = other RNA
gtgccttccaggaagatct

SEQ ID NO: 7487 - RNA, 19 nt, synthetic construct
  source 1..19: mol_type = other RNA
tgtgccttccaggaagatc

SEQ ID NO: 7488 - RNA, 19 nt, synthetic construct
  source 1..19: mol_type = other RNA
gtgtgccttccaggaagat

SEQ ID NO: 7489 - RNA, 19 nt, synthetic construct
  source 1..19: mol_type = other RNA
cgtgtgccttccaggaaga

SEQ ID NO: 7490 - RNA, 19 nt, synthetic construct
  source 1..19: mol_type = other RNA
acgtgtgccttccaggaag

SEQ ID NO: 7491 - RNA, 19 nt, synthetic construct
  source 1..19: mol_type = other RNA
aacgtgtgccttccaggaa

SEQ ID NO: 7492 - RNA, 19 nt, synthetic construct
  source 1..19: mol_type = other RNA
gaacgtgtgccttccagga

SEQ ID NO: 7493 - RNA, 19 nt, synthetic construct
  source 1..19: mol_type = other RNA
agaacgtgtgccttccagg

SEQ ID NO: 7494 - RNA, 19 nt, synthetic construct
  source 1..19: mol_type = other RNA
tagaacgtgtgccttccag

SEQ ID NO: 7495 - RNA, 19 nt, synthetic construct
  source 1..19: mol_type = other RNA
ctagaacgtgtgccttcca

SEQ ID NO: 7496 - RNA, 19 nt, synthetic construct
  source 1..19: mol_type = other RNA
cctagaacgtgtgccttcc

SEQ ID NO: 7497 - RNA, 19 nt, synthetic construct
  source 1..19: mol_type = other RNA
tcctagaacgtgtgccttc

SEQ ID NO: 7498 - RNA, 19 nt, synthetic construct
  source 1..19: mol_type = other RNA
ctcctagaacgtgtgcctt

SEQ ID NO: 7499 - RNA, 19 nt, synthetic construct
  source 1..19: mol_type = other RNA
actcctagaacgtgtgcct

SEQ ID NO: 7500 - RNA, 19 nt, synthetic construct
  source 1..19: mol_type = other RNA
cactcctagaacgtgtgcc

SEQ ID NO: 7501 - RNA, 19 nt, synthetic construct
  source 1..19: mol_type = other RNA
ccactcctagaacgtgtgc

SEQ ID NO: 7502 - RNA, 19 nt, synthetic construct
  source 1..19: mol_type = other RNA
tccactcctagaacgtgtg

SEQ ID NO: 7503 - RNA, 19 nt, synthetic construct
  source 1..19: mol_type = other RNA
ttccactcctagaacgtgt

SEQ ID NO: 7504 - RNA, 19 nt, synthetic construct
  source 1..19: mol_type = other RNA
tttccactcctagaacgtg

SEQ ID NO: 7505 - RNA, 19 nt, synthetic construct
  source 1..19: mol_type = other RNA
ttttccactcctagaacgt

SEQ ID NO: 7506 - RNA, 19 nt, synthetic construct
  source 1..19: mol_type = other RNA
tttttccactcctagaacg

SEQ ID NO: 7507 - RNA, 19 nt, synthetic construct
  source 1..19: mol_type = other RNA
gtttttccactcctagaac

SEQ ID NO: 7508 - RNA, 19 nt, synthetic construct
  source 1..19: mol_type = other RNA
ggtttttccactcctagaa

SEQ ID NO: 7509 - RNA, 19 nt, synthetic construct
  source 1..19: mol_type = other RNA
aggtttttccactcctaga

SEQ ID NO: 7510 - RNA, 19 nt, synthetic construct
  source 1..19: mol_type = other RNA
gaggtttttccactcctag

SEQ ID NO: 7511 - RNA, 19 nt, synthetic construct
  source 1..19: mol_type = other RNA
agaggtttttccactccta

SEQ ID NO: 7512 - RNA, 19 nt, synthetic construct
  source 1..19: mol_type = other RNA
aagaggtttttccactcct

SEQ ID NO: 7513 - RNA, 19 nt, synthetic construct
  source 1..19: mol_type = other RNA
caagaggtttttccactcc

SEQ ID NO: 7514 - RNA, 19 nt, synthetic construct
  source 1..19: mol_type = other RNA
acaagaggtttttccactc

SEQ ID NO: 7515 - RNA, 19 nt, synthetic construct
  source 1..19: mol_type = other RNA
cacaagaggtttttccact

SEQ ID NO: 7516 - RNA, 19 nt, synthetic construct
  source 1..19: mol_type = other RNA
gcacaagaggtttttccac

SEQ ID NO: 7517 - RNA, 19 nt, synthetic construct
  source 1..19: mol_type = other RNA
agcacaagaggtttttcca

SEQ ID NO: 7518 - RNA, 19 nt, synthetic construct
  source 1..19: mol_type = other RNA
gagcacaagaggtttttcc

SEQ ID NO: 7519 - RNA, 19 nt, synthetic construct
  source 1..19: mol_type = other RNA
cgagcacaagaggtttttc

SEQ ID NO: 7520 - RNA, 19 nt, synthetic construct
  source 1..19: mol_type = other RNA
ccgagcacaagaggttttt

SEQ ID NO: 7521 - RNA, 19 nt, synthetic construct
  source 1..19: mol_type = other RNA
cccgagcacaagaggtttt

SEQ ID NO: 7522 - RNA, 19 nt, synthetic construct
  source 1..19: mol_type = other RNA
gcccgagcacaagaggttt

SEQ ID NO: 7523 - RNA, 19 nt, synthetic construct
  source 1..19: mol_type = other RNA
tgcccgagcacaagaggtt

SEQ ID NO: 7524 - RNA, 19 nt, synthetic construct
  source 1..19: mol_type = other RNA
ctgcccgagcacaagaggt

SEQ ID NO: 7525 - RNA, 19 nt, synthetic construct
  source 1..19: mol_type = other RNA
cctgcccgagcacaagagg

SEQ ID NO: 7526 - RNA, 19 nt, synthetic construct
  source 1..19: mol_type = other RNA
tcctgcccgagcacaagag

SEQ ID NO: 7527 - RNA, 19 nt, synthetic construct
  source 1..19: mol_type = other RNA
gtcctgcccgagcacaaga

SEQ ID NO: 7528 - RNA, 19 nt, synthetic construct
  source 1..19: mol_type = other RNA
agtcctgcccgagcacaag

SEQ ID NO: 7529 - RNA, 19 nt, synthetic construct
  source 1..19: mol_type = other RNA
aagtcctgcccgagcacaa

SEQ ID NO: 7530 - RNA, 19 nt, synthetic construct
  source 1..19: mol_type = other RNA
aaagtcctgcccgagcaca

SEQ ID NO: 7531 - RNA, 19 nt, synthetic construct
  source 1..19: mol_type = other RNA
aaaagtcctgcccgagcac

SEQ ID NO: 7532 - RNA, 19 nt, synthetic construct
  source 1..19: mol_type = other RNA
caaaagtcctgcccgagca

SEQ ID NO: 7533 - RNA, 19 nt, synthetic construct
  source 1..19: mol_type = other RNA
acaaaagtcctgcccgagc

SEQ ID NO: 7534 - RNA, 19 nt, synthetic construct
  source 1..19: mol_type = other RNA
gacaaaagtcctgcccgag

SEQ ID NO: 7535 - RNA, 19 nt, synthetic construct
  source 1..19: mol_type = other RNA
tgacaaaagtcctgcccga

SEQ ID NO: 7536 - RNA, 19 nt, synthetic construct
  source 1..19: mol_type = other RNA
ctgacaaaagtcctgcccg

SEQ ID NO: 7537 - RNA, 19 nt, synthetic construct
  source 1..19: mol_type = other RNA
actgacaaaagtcctgccc

SEQ ID NO: 7538 - RNA, 19 nt, synthetic construct
  source 1..19: mol_type = other RNA
aactgacaaaagtcctgcc

SEQ ID NO: 7539 - RNA, 19 nt, synthetic construct
  source 1..19: mol_type = other RNA
caactgacaaaagtcctgc

SEQ ID NO: 7540 - RNA, 19 nt, synthetic construct
  source 1..19: mol_type = other RNA
acaactgacaaaagtcctg

SEQ ID NO: 7541 - RNA, 19 nt, synthetic construct
  source 1..19: mol_type = other RNA
cacaactgacaaaagtcct

SEQ ID NO: 7542 - RNA, 19 nt, synthetic construct
  source 1..19: mol_type = other RNA
ccacaactgacaaaagtcc

SEQ ID NO: 7543 - RNA, 19 nt, synthetic construct
  source 1..19: mol_type = other RNA
accacaactgacaaaagtc

SEQ ID NO: 7544 - RNA, 19 nt, synthetic construct
  source 1..19: mol_type = other RNA
taccacaactgacaaaagt

SEQ ID NO: 7545 - RNA, 19 nt, synthetic construct
  source 1..19: mol_type = other RNA
ctaccacaactgacaaaag

SEQ ID NO: 7546 - RNA, 19 nt, synthetic construct
  source 1..19: mol_type = other RNA
tctaccacaactgacaaaa

SEQ ID NO: 7547 - RNA, 19 nt, synthetic construct
  source 1..19: mol_type = other RNA
atctaccacaactgacaaa

SEQ ID NO: 7548 - RNA, 19 nt, synthetic construct
  source 1..19: mol_type = other RNA
tatctaccacaactgacaa

SEQ ID NO: 7549 - RNA, 19 nt, synthetic construct
  source 1..19: mol_type = other RNA
gtatctaccacaactgaca

SEQ ID NO: 7550 - RNA, 19 nt, synthetic construct
  source 1..19: mol_type = other RNA
agtatctaccacaactgac

SEQ ID NO: 7551 - RNA, 19 nt, synthetic construct
  source 1..19: mol_type = other RNA
gagtatctaccacaactga

SEQ ID NO: 7552 - RNA, 19 nt, synthetic construct
  source 1..19: mol_type = other RNA
agagtatctaccacaactg

SEQ ID NO: 7553 - RNA, 19 nt, synthetic construct
  source 1..19: mol_type = other RNA
cagagtatctaccacaact

SEQ ID NO: 7554 - RNA, 19 nt, synthetic construct
  source 1..19: mol_type = other RNA
acagagtatctaccacaac

SEQ ID NO: 7555 - RNA, 19 nt, synthetic construct
  source 1..19: mol_type = other RNA
gacagagtatctaccacaa

SEQ ID NO: 7556 - RNA, 19 nt, synthetic construct
  source 1..19: mol_type = other RNA
agacagagtatctaccaca

SEQ ID NO: 7557 - RNA, 19 nt, synthetic construct
  source 1..19: mol_type = other RNA
tagacagagtatctaccac

SEQ ID NO: 7558 - RNA, 19 nt, synthetic construct
  source 1..19: mol_type = other RNA
gtagacagagtatctacca

SEQ ID NO: 7559 - RNA, 19 nt, synthetic construct
  source 1..19: mol_type = other RNA
ggtagacagagtatctacc

SEQ ID NO: 7560 - RNA, 19 nt, synthetic construct
  source 1..19: mol_type = other RNA
tggtagacagagtatctac

SEQ ID NO: 7561 - RNA, 19 nt, synthetic construct
  source 1..19: mol_type = other RNA
ttggtagacagagtatcta

SEQ ID NO: 7562 - RNA, 19 nt, synthetic construct
  source 1..19: mol_type = other RNA
attggtagacagagtatct

SEQ ID NO: 7563 - RNA, 19 nt, synthetic construct
  source 1..19: mol_type = other RNA
cattggtagacagagtatc

SEQ ID NO: 7564 - RNA, 19 nt, synthetic construct
  source 1..19: mol_type = other RNA
acattggtagacagagtat

SEQ ID NO: 7565 - RNA, 19 nt, synthetic construct
  source 1..19: mol_type = other RNA
gacattggtagacagagta

SEQ ID NO: 7566 - RNA, 19 nt, synthetic construct
  source 1..19: mol_type = other RNA
tgacattggtagacagagt

SEQ ID NO: 7567 - RNA, 19 nt, synthetic construct
  source 1..19: mol_type = other RNA
atgacattggtagacagag

SEQ ID NO: 7568 - RNA, 19 nt, synthetic construct
  source 1..19: mol_type = other RNA
gatgacattggtagacaga

SEQ ID NO: 7569 - RNA, 19 nt, synthetic construct
  source 1..19: mol_type = other RNA
ggatgacattggtagacag

SEQ ID NO: 7570 - RNA, 19 nt, synthetic construct
  source 1..19: mol_type = other RNA
gggatgacattggtagaca

SEQ ID NO: 7571 - RNA, 19 nt, synthetic construct
  source 1..19: mol_type = other RNA
tgggatgacattggtagac

SEQ ID NO: 7572 - RNA, 19 nt, synthetic construct
  source 1..19: mol_type = other RNA
ctgggatgacattggtaga

SEQ ID NO: 7573 - RNA, 19 nt, synthetic construct
  source 1..19: mol_type = other RNA
tctgggatgacattggtag

SEQ ID NO: 7574 - RNA, 19 nt, synthetic construct
  source 1..19: mol_type = other RNA
gtctgggatgacattggta

SEQ ID NO: 7575 - RNA, 19 nt, synthetic construct
  source 1..19: mol_type = other RNA
tgtctgggatgacattggt

SEQ ID NO: 7576 - RNA, 19 nt, synthetic construct
  source 1..19: mol_type = other RNA
atgtctgggatgacattgg

SEQ ID NO: 7577 - RNA, 19 nt, synthetic construct
  source 1..19: mol_type = other RNA
gatgtctgggatgacattg

SEQ ID NO: 7578 - RNA, 19 nt, synthetic construct
  source 1..19: mol_type = other RNA
agatgtctgggatgacatt

SEQ ID NO: 7579 - RNA, 19 nt, synthetic construct
  source 1..19: mol_type = other RNA
aagatgtctgggatgacat

SEQ ID NO: 7580 - RNA, 19 nt, synthetic construct
  source 1..19: mol_type = other RNA
caagatgtctgggatgaca

SEQ ID NO: 7581 - RNA, 19 nt, synthetic construct
  source 1..19: mol_type = other RNA
tcaagatgtctgggatgac

SEQ ID NO: 7582 - RNA, 19 nt, synthetic construct
  source 1..19: mol_type = other RNA
atcaagatgtctgggatga

SEQ ID NO: 7583 - RNA, 19 nt, synthetic construct
  source 1..19: mol_type = other RNA
tatcaagatgtctgggatg

SEQ ID NO: 7584 - RNA, 19 nt, synthetic construct
  source 1..19: mol_type = other RNA
ttatcaagatgtctgggat

SEQ ID NO: 7585 - RNA, 19 nt, synthetic construct
  source 1..19: mol_type = other RNA
attatcaagatgtctggga

SEQ ID NO: 7586 - RNA, 19 nt, synthetic construct
  source 1..19: mol_type = other RNA
tattatcaagatgtctggg

SEQ ID NO: 7587 - RNA, 19 nt, synthetic construct
  source 1..19: mol_type = other RNA
gtattatcaagatgtctgg

SEQ ID NO: 7588 - RNA, 19 nt, synthetic construct
  source 1..19: mol_type = other RNA
ggtattatcaagatgtctg

SEQ ID NO: 7589 - RNA, 19 nt, synthetic construct
  source 1..19: mol_type = other RNA
aggtattatcaagatgtct

SEQ ID NO: 7590 - RNA, 19 nt, synthetic construct
  source 1..19: mol_type = other RNA
caggtattatcaagatgtc

SEQ ID NO: 7591 - RNA, 19 nt, synthetic construct
  source 1..19: mol_type = other RNA
acaggtattatcaagatgt

SEQ ID NO: 7592 - RNA, 19 nt, synthetic construct
  source 1..19: mol_type = other RNA
aacaggtattatcaagatg

SEQ ID NO: 7593 - RNA, 19 nt, synthetic construct
  source 1..19: mol_type = other RNA
caacaggtattatcaagat

SEQ ID NO: 7594 - RNA, 19 nt, synthetic construct
  source 1..19: mol_type = other RNA
ccaacaggtattatcaaga

SEQ ID NO: 7595 - RNA, 19 nt, synthetic construct
  source 1..19: mol_type = other RNA
tccaacaggtattatcaag

SEQ ID NO: 7596 - RNA, 19 nt, synthetic construct
  source 1..19: mol_type = other RNA
ttccaacaggtattatcaa

SEQ ID NO: 7597 - RNA, 19 nt, synthetic construct
  source 1..19: mol_type = other RNA
attccaacaggtattatca

SEQ ID NO: 7598 - RNA, 19 nt, synthetic construct
  source 1..19: mol_type = other RNA
gattccaacaggtattatc

SEQ ID NO: 7599 - RNA, 19 nt, synthetic construct
  source 1..19: mol_type = other RNA
agattccaacaggtattat

SEQ ID NO: 7600 - RNA, 19 nt, synthetic construct
  source 1..19: mol_type = other RNA
gagattccaacaggtatta

SEQ ID NO: 7601 - RNA, 19 nt, synthetic construct
  source 1..19: mol_type = other RNA
ggagattccaacaggtatt

SEQ ID NO: 7602 - RNA, 19 nt, synthetic construct
  source 1..19: mol_type = other RNA
aggagattccaacaggtat

SEQ ID NO: 7603 - RNA, 19 nt, synthetic construct
  source 1..19: mol_type = other RNA
taggagattccaacaggta

SEQ ID NO: 7604 - RNA, 19 nt, synthetic construct
  source 1..19: mol_type = other RNA
ataggagattccaacaggt

SEQ ID NO: 7605 - RNA, 19 nt, synthetic construct
  source 1..19: mol_type = other RNA
cataggagattccaacagg

SEQ ID NO: 7606 - RNA, 19 nt, synthetic construct
  source 1..19: mol_type = other RNA
tcataggagattccaacag

SEQ ID NO: 7607 - RNA, 19 nt, synthetic construct
  source 1..19: mol_type = other RNA
atcataggagattccaaca

SEQ ID NO: 7608 - RNA, 19 nt, synthetic construct
  source 1..19: mol_type = other RNA
gatcataggagattccaac

SEQ ID NO: 7609 - RNA, 19 nt, synthetic construct
  source 1..19: mol_type = other RNA
cgatcataggagattccaa

SEQ ID NO: 7610 - RNA, 19 nt, synthetic construct
  source 1..19: mol_type = other RNA
gcgatcataggagattcca

SEQ ID NO: 7611 - RNA, 19 nt, synthetic construct
  source 1..19: mol_type = other RNA
tgcgatcataggagattcc

SEQ ID NO: 7612 - RNA, 19 nt, synthetic construct
  source 1..19: mol_type = other RNA
atgcgatcataggagattc

SEQ ID NO: 7613 - RNA, 19 nt, synthetic construct
  source 1..19: mol_type = other RNA
aatgcgatcataggagatt

SEQ ID NO: 7614 - RNA, 19 nt, synthetic construct
  source 1..19: mol_type = other RNA
taatgcgatcataggagat

SEQ ID NO: 7615 - RNA, 19 nt, synthetic construct
  source 1..19: mol_type = other RNA
ataatgcgatcataggaga

SEQ ID NO: 7616 - RNA, 19 nt, synthetic construct
  source 1..19: mol_type = other RNA
gataatgcgatcataggag

SEQ ID NO: 7617 - RNA, 19 nt, synthetic construct
  source 1..19: mol_type = other RNA
cgataatgcgatcatagga

SEQ ID NO: 7618 - RNA, 19 nt, synthetic construct
  source 1..19: mol_type = other RNA
tcgataatgcgatcatagg

SEQ ID NO: 7619 - RNA, 19 nt, synthetic construct
  source 1..19: mol_type = other RNA
ttcgataatgcgatcatag

SEQ ID NO: 7620 - RNA, 19 nt, synthetic construct
  source 1..19: mol_type = other RNA
cttcgataatgcgatcata

SEQ ID NO: 7621 - RNA, 19 nt, synthetic construct
  source 1..19: mol_type = other RNA
ccttcgataatgcgatcat

SEQ ID NO: 7622 - RNA, 19 nt, synthetic construct
  source 1..19: mol_type = other RNA
accttcgataatgcgatca

SEQ ID NO: 7623 - RNA, 19 nt, synthetic construct
  source 1..19: mol_type = other RNA
gaccttcgataatgcgatc

SEQ ID NO: 7624 - RNA, 19 nt, synthetic construct
  source 1..19: mol_type = other RNA
tgaccttcgataatgcgat

SEQ ID NO: 7625 - RNA, 19 nt, synthetic construct
  source 1..19: mol_type = other RNA
gtgaccttcgataatgcga

SEQ ID NO: 7626 - RNA, 19 nt, synthetic construct
  source 1..19: mol_type = other RNA
agtgaccttcgataatgcg

SEQ ID NO: 7627 - RNA, 19 nt, synthetic construct
  source 1..19: mol_type = other RNA
tagtgaccttcgataatgc

SEQ ID NO: 7628 - RNA, 19 nt, synthetic construct
  source 1..19: mol_type = other RNA
gtagtgaccttcgataatg

SEQ ID NO: 7629 - RNA, 19 nt, synthetic construct
  source 1..19: mol_type = other RNA
tgtagtgaccttcgataat

SEQ ID NO: 7630 - RNA, 19 nt, synthetic construct
  source 1..19: mol_type = other RNA
ttgtagtgaccttcgataa

SEQ ID NO: 7631 - RNA, 19 nt, synthetic construct
  source 1..19: mol_type = other RNA
attgtagtgaccttcgata

SEQ ID NO: 7632 - RNA, 19 nt, synthetic construct
  source 1..19: mol_type = other RNA
cattgtagtgaccttcgat

SEQ ID NO: 7633 - RNA, 19 nt, synthetic construct
  source 1..19: mol_type = other RNA
ccattgtagtgaccttcga

SEQ ID NO: 7634 - RNA, 19 nt, synthetic construct
  source 1..19: mol_type = other RNA
accattgtagtgaccttcg

SEQ ID NO: 7635 - RNA, 19 nt, synthetic construct
  source 1..19: mol_type = other RNA
caccattgtagtgaccttc

SEQ ID NO: 7636 - RNA, 19 nt, synthetic construct
  source 1..19: mol_type = other RNA
tcaccattgtagtgacctt

SEQ ID NO: 7637 - RNA, 19 nt, synthetic construct
  source 1..19: mol_type = other RNA
ttcaccattgtagtgacct

SEQ ID NO: 7638 - RNA, 19 nt, synthetic construct
  source 1..19: mol_type = other RNA
gttcaccattgtagtgacc

SEQ ID NO: 7639 - RNA, 19 nt, synthetic construct
  source 1..19: mol_type = other RNA
tgttcaccattgtagtgac

SEQ ID NO: 7640 - RNA, 19 nt, synthetic construct
  source 1..19: mol_type = other RNA
ttgttcaccattgtagtga

SEQ ID NO: 7641 - RNA, 19 nt, synthetic construct
  source 1..19: mol_type = other RNA
gttgttcaccattgtagtg

SEQ ID NO: 7642 - RNA, 19 nt, synthetic construct
  source 1..19: mol_type = other RNA
agttgttcaccattgtagt

SEQ ID NO: 7643 - RNA, 19 nt, synthetic construct
  source 1..19: mol_type = other RNA
cagttgttcaccattgtag

SEQ ID NO: 7644 - RNA, 19 nt, synthetic construct
  source 1..19: mol_type = other RNA
ccagttgttcaccattgta

SEQ ID NO: 7645 - RNA, 19 nt, synthetic construct
  source 1..19: mol_type = other RNA
cccagttgttcaccattgt

SEQ ID NO: 7646 - RNA, 19 nt, synthetic construct
  source 1..19: mol_type = other RNA
gcccagttgttcaccattg

SEQ ID NO: 7647 - RNA, 19 nt, synthetic construct
  source 1..19: mol_type = other RNA
tgcccagttgttcaccatt

SEQ ID NO: 7648 - RNA, 19 nt, synthetic construct
  source 1..19: mol_type = other RNA
ttgcccagttgttcaccat

SEQ ID NO: 7649 - RNA, 19 nt, synthetic construct
  source 1..19: mol_type = other RNA
tttgcccagttgttcacca

SEQ ID NO: 7650 - RNA, 19 nt, synthetic construct
  source 1..19: mol_type = other RNA
gtttgcccagttgttcacc

SEQ ID NO: 7651 - RNA, 19 nt, synthetic construct
  source 1..19: mol_type = other RNA
ggtttgcccagttgttcac

SEQ ID NO: 7652 - RNA, 19 nt, synthetic construct
  source 1..19: mol_type = other RNA
aggtttgcccagttgttca

SEQ ID NO: 7653 - RNA, 19 nt, synthetic construct
  source 1..19: mol_type = other RNA
taggtttgcccagttgttc

SEQ ID NO: 7654 - RNA, 19 nt, synthetic construct
  source 1..19: mol_type = other RNA
ttaggtttgcccagttgtt

SEQ ID NO: 7655 - RNA, 19 nt, synthetic construct
  source 1..19: mol_type = other RNA
cttaggtttgcccagttgt

SEQ ID NO: 7656 - RNA, 19 nt, synthetic construct
  source 1..19: mol_type = other RNA
tcttaggtttgcccagttg

SEQ ID NO: 7657 - RNA, 19 nt, synthetic construct
  source 1..19: mol_type = other RNA
ttcttaggtttgcccagtt

SEQ ID NO: 7658 - RNA, 19 nt, synthetic construct
  source 1..19: mol_type = other RNA
cttcttaggtttgcccagt

SEQ ID NO: 7659 - RNA, 19 nt, synthetic construct
  source 1..19: mol_type = other RNA
tcttcttaggtttgcccag

SEQ ID NO: 7660 - RNA, 19 nt, synthetic construct
  source 1..19: mol_type = other RNA
ttcttcttaggtttgccca

SEQ ID NO: 7661 - RNA, 19 nt, synthetic construct
  source 1..19: mol_type = other RNA
attcttcttaggtttgccc

SEQ ID NO: 7662 - RNA, 19 nt, synthetic construct
  source 1..19: mol_type = other RNA
cattcttcttaggtttgcc

SEQ ID NO: 7663 - RNA, 19 nt, synthetic construct
  source 1..19: mol_type = other RNA
tcattcttcttaggtttgc

SEQ ID NO: 7664 - RNA, 19 nt, synthetic construct
  source 1..19: mol_type = other RNA
ctcattcttcttaggtttg

SEQ ID NO: 7665 - RNA, 19 nt, synthetic construct
  source 1..19: mol_type = other RNA
tctcattcttcttaggttt

SEQ ID NO: 7666 - RNA, 19 nt, synthetic construct
  source 1..19: mol_type = other RNA
ctctcattcttcttaggtt

SEQ ID NO: 7667 - RNA, 19 nt, synthetic construct
  source 1..19: mol_type = other RNA
gctctcattcttcttaggt

SEQ ID NO: 7668 - RNA, 19 nt, synthetic construct
  source 1..19: mol_type = other RNA
ggctctcattcttcttagg

SEQ ID NO: 7669 - RNA, 19 nt, synthetic construct
  source 1..19: mol_type = other RNA
aggctctcattcttcttag

SEQ ID NO: 7670 - RNA, 19 nt, synthetic construct
  source 1..19: mol_type = other RNA
caggctctcattcttctta

SEQ ID NO: 7671 - RNA, 19 nt, synthetic construct
  source 1..19: mol_type = other RNA
acaggctctcattcttctt

SEQ ID NO: 7672 - RNA, 19 nt, synthetic construct
  source 1..19: mol_type = other RNA
cacaggctctcattcttct

SEQ ID NO: 7673 - RNA, 19 nt, synthetic construct
  source 1..19: mol_type = other RNA
ccacaggctctcattcttc

SEQ ID NO: 7674 - RNA, 19 nt, synthetic construct
  source 1..19: mol_type = other RNA
tccacaggctctcattctt

SEQ ID NO: 7675 - RNA, 19 nt, synthetic construct
  source 1..19: mol_type = other RNA
ctccacaggctctcattct

SEQ ID NO: 7676 - RNA, 19 nt, synthetic construct
  source 1..19: mol_type = other RNA
actccacaggctctcattc

SEQ ID NO: 7677 - RNA, 19 nt, synthetic construct
  source 1..19: mol_type = other RNA
cactccacaggctctcatt

SEQ ID NO: 7678 - RNA, 19 nt, synthetic construct
  source 1..19: mol_type = other RNA
acactccacaggctctcat

SEQ ID NO: 7679 - RNA, 19 nt, synthetic construct
  source 1..19: mol_type = other RNA
tacactccacaggctctca

SEQ ID NO: 7680 - RNA, 19 nt, synthetic construct
  source 1..19: mol_type = other RNA
ctacactccacaggctctc

SEQ ID NO: 7681 - RNA, 19 nt, synthetic construct
  source 1..19: mol_type = other RNA
gctacactccacaggctct

SEQ ID NO: 7682 - RNA, 19 nt, synthetic construct
  source 1..19: mol_type = other RNA
tgctacactccacaggctc

SEQ ID NO: 7683 - RNA, 19 nt, synthetic construct
  source 1..19: mol_type = other RNA
ttgctacactccacaggct

SEQ ID NO: 7684 - RNA, 19 nt, synthetic construct
  source 1..19: mol_type = other RNA
cttgctacactccacaggc

SEQ ID NO: 7685 - RNA, 19 nt, synthetic construct
  source 1..19: mol_type = other RNA
tcttgctacactccacagg

SEQ ID NO: 7686 - RNA, 19 nt, synthetic construct
  source 1..19: mol_type = other RNA
ctcttgctacactccacag

SEQ ID NO: 7687 - RNA, 19 nt, synthetic construct
  source 1..19: mol_type = other RNA
cctcttgctacactccaca

SEQ ID NO: 7688 - RNA, 19 nt, synthetic construct
  source 1..19: mol_type = other RNA
acctcttgctacactccac

SEQ ID NO: 7689 - RNA, 19 nt, synthetic construct
  source 1..19: mol_type = other RNA
cacctcttgctacactcca

SEQ ID NO: 7690 - RNA, 19 nt, synthetic construct
  source 1..19: mol_type = other RNA
acacctcttgctacactcc

SEQ ID NO: 7691 - RNA, 19 nt, synthetic construct
  source 1..19: mol_type = other RNA
aacacctcttgctacactc

SEQ ID NO: 7692 - RNA, 19 nt, synthetic construct
  source 1..19: mol_type = other RNA
taacacctcttgctacact

SEQ ID NO: 7693 - RNA, 19 nt, synthetic construct
  source 1..19: mol_type = other RNA
ataacacctcttgctacac

SEQ ID NO: 7694 - RNA, 19 nt, synthetic construct
  source 1..19: mol_type = other RNA
aataacacctcttgctaca

SEQ ID NO: 7695 - RNA, 19 nt, synthetic construct
  source 1..19: mol_type = other RNA
taataacacctcttgctac

SEQ ID NO: 7696 - RNA, 19 nt, synthetic construct
  source 1..19: mol_type = other RNA
ctaataacacctcttgcta

SEQ ID NO: 7697 - RNA, 19 nt, synthetic construct
  source 1..19: mol_type = other RNA
tctaataacacctcttgct

SEQ ID NO: 7698 - RNA, 19 nt, synthetic construct
  source 1..19: mol_type = other RNA
ttctaataacacctcttgc

SEQ ID NO: 7699 - RNA, 19 nt, synthetic construct
  source 1..19: mol_type = other RNA
attctaataacacctcttg

SEQ ID NO: 7700 - RNA, 19 nt, synthetic construct
  source 1..19: mol_type = other RNA
cattctaataacacctctt

SEQ ID NO: 7701 - RNA, 19 nt, synthetic construct
  source 1..19: mol_type = other RNA
acattctaataacacctct

SEQ ID NO: 7702 - RNA, 19 nt, synthetic construct
  source 1..19: mol_type = other RNA
aacattctaataacacctc

SEQ ID NO: 7703 - RNA, 19 nt, synthetic construct
  source 1..19: mol_type = other RNA
taacattctaataacacct

SEQ ID NO: 7704 - RNA, 19 nt, synthetic construct
  source 1..19: mol_type = other RNA
gtaacattctaataacacc

SEQ ID NO: 7705 - RNA, 19 nt, synthetic construct
  source 1..19: mol_type = other RNA
cgtaacattctaataacac

SEQ ID NO: 7706 - RNA, 19 nt, synthetic construct
  source 1..19: mol_type = other RNA
tcgtaacattctaataaca

SEQ ID NO: 7707 - RNA, 19 nt, synthetic construct
  source 1..19: mol_type = other RNA
ttcgtaacattctaataac

SEQ ID NO: 7708 - RNA, 19 nt, synthetic construct
  source 1..19: mol_type = other RNA
tttcgtaacattctaataa

SEQ ID NO: 7709 - RNA, 19 nt, synthetic construct
  source 1..19: mol_type = other RNA
ttttcgtaacattctaata

SEQ ID NO: 7710 - RNA, 19 nt, synthetic construct
  source 1..19: mol_type = other RNA
tttttcgtaacattctaat

SEQ ID NO: 7711 - RNA, 19 nt, synthetic construct
  source 1..19: mol_type = other RNA
ttttttcgtaacattctaa

SEQ ID NO: 7712 - RNA, 19 nt, synthetic construct
  source 1..19: mol_type = other RNA
gttttttcgtaacattcta

SEQ ID NO: 7713 - RNA, 19 nt, synthetic construct
  source 1..19: mol_type = other RNA
agttttttcgtaacattct

SEQ ID NO: 7714 - RNA, 19 nt, synthetic construct
  source 1..19: mol_type = other RNA
tagttttttcgtaacattc

SEQ ID NO: 7715 - RNA, 19 nt, synthetic construct
  source 1..19: mol_type = other RNA
atagttttttcgtaacatt

SEQ ID NO: 7716 - RNA, 19 nt, synthetic construct
  source 1..19: mol_type = other RNA
catagttttttcgtaacat

SEQ ID NO: 7717 - RNA, 19 nt, synthetic construct
  source 1..19: mol_type = other RNA
ccatagttttttcgtaaca

SEQ ID NO: 7718 - RNA, 19 nt, synthetic construct
  source 1..19: mol_type = other RNA
accatagttttttcgtaac

SEQ ID NO: 7719 - RNA, 19 nt, synthetic construct
  source 1..19: mol_type = other RNA
aaccatagttttttcgtaa

SEQ ID NO: 7720 - RNA, 19 nt, synthetic construct
  source 1..19: mol_type = other RNA
caaccatagttttttcgta

SEQ ID NO: 7721 - RNA, 19 nt, synthetic construct
  source 1..19: mol_type = other RNA
acaaccatagttttttcgt

SEQ ID NO: 7722 - RNA, 19 nt, synthetic construct
  source 1..19: mol_type = other RNA
cacaaccatagttttttcg

SEQ ID NO: 7723 - RNA, 19 nt, synthetic construct
  source 1..19: mol_type = other RNA
acacaaccatagttttttc

SEQ ID NO: 7724 - RNA, 19 nt, synthetic construct
  source 1..19: mol_type = other RNA
gacacaaccatagtttttt

SEQ ID NO: 7725 - RNA, 19 nt, synthetic construct
  source 1..19: mol_type = other RNA
ggacacaaccatagttttt

SEQ ID NO: 7726 - RNA, 19 nt, synthetic construct
  source 1..19: mol_type = other RNA
cggacacaaccatagtttt

SEQ ID NO: 7727 - RNA, 19 nt, synthetic construct
  source 1..19: mol_type = other RNA
tcggacacaaccatagttt

SEQ ID NO: 7728 - RNA, 19 nt, synthetic construct
  source 1..19: mol_type = other RNA
ctcggacacaaccatagtt

SEQ ID NO: 7729 - RNA, 19 nt, synthetic construct
  source 1..19: mol_type = other RNA
actcggacacaaccatagt

SEQ ID NO: 7730 - RNA, 19 nt, synthetic construct
  source 1..19: mol_type = other RNA
cactcggacacaaccatag

SEQ ID NO: 7731 - RNA, 19 nt, synthetic construct
  source 1..19: mol_type = other RNA
ccactcggacacaaccata

SEQ ID NO: 7732 - RNA, 19 nt, synthetic construct
  source 1..19: mol_type = other RNA
tccactcggacacaaccat

SEQ ID NO: 7733 - RNA, 19 nt, synthetic construct
  source 1..19: mol_type = other RNA
atccactcggacacaacca

SEQ ID NO: 7734 - RNA, 19 nt, synthetic construct
  source 1..19: mol_type = other RNA
aatccactcggacacaacc

SEQ ID NO: 7735 - RNA, 19 nt, synthetic construct
  source 1..19: mol_type = other RNA
aaatccactcggacacaac

SEQ ID NO: 7736 - RNA, 19 nt, synthetic construct
  source 1..19: mol_type = other RNA
aaaatccactcggacacaa

SEQ ID NO: 7737 - RNA, 19 nt, synthetic construct
  source 1..19: mol_type = other RNA
caaaatccactcggacaca

SEQ ID NO: 7738 - RNA, 19 nt, synthetic construct
  source 1..19: mol_type = other RNA
gcaaaatccactcggacac

SEQ ID NO: 7739 - RNA, 19 nt, synthetic construct
  source 1..19: mol_type = other RNA
tgcaaaatccactcggaca

SEQ ID NO: 7740 - RNA, 19 nt, synthetic construct
  source 1..19: mol_type = other RNA
gtgcaaaatccactcggac

SEQ ID NO: 7741 - RNA, 19 nt, synthetic construct
  source 1..19: mol_type = other RNA
tgtgcaaaatccactcgga

SEQ ID NO: 7742 - RNA, 19 nt, synthetic construct
  source 1..19: mol_type = other RNA
ctgtgcaaaatccactcgg

SEQ ID NO: 7743 - RNA, 19 nt, synthetic construct
  source 1..19: mol_type = other RNA
gctgtgcaaaatccactcg

SEQ ID NO: 7744 - RNA, 19 nt, synthetic construct
  source 1..19: mol_type = other RNA
ggctgtgcaaaatccactc

SEQ ID NO: 7745 - RNA, 19 nt, synthetic construct
  source 1..19: mol_type = other RNA
tggctgtgcaaaatccact

SEQ ID NO: 7746 - RNA, 19 nt, synthetic construct
  source 1..19: mol_type = other RNA
atggctgtgcaaaatccac

SEQ ID NO: 7747 - RNA, 19 nt, synthetic construct
  source 1..19: mol_type = other RNA
aatggctgtgcaaaatcca

SEQ ID NO: 7748 - RNA, 19 nt, synthetic construct
  source 1..19: mol_type = other RNA
aaatggctgtgcaaaatcc

SEQ ID NO: 7749 - RNA, 19 nt, synthetic construct
  source 1..19: mol_type = other RNA
aaaatggctgtgcaaaatc

SEQ ID NO: 7750 - RNA, 19 nt, synthetic construct
  source 1..19: mol_type = other RNA
gaaaatggctgtgcaaaat

SEQ ID NO: 7751 - RNA, 19 nt, synthetic construct
  source 1..19: mol_type = other RNA
ggaaaatggctgtgcaaaa

SEQ ID NO: 7752 - RNA, 19 nt, synthetic construct
  source 1..19: mol_type = other RNA
aggaaaatggctgtgcaaa

SEQ ID NO: 7753 - RNA, 19 nt, synthetic construct
  source 1..19: mol_type = other RNA
aaggaaaatggctgtgcaa

SEQ ID NO: 7754 - RNA, 19 nt, synthetic construct
  source 1..19: mol_type = other RNA
taaggaaaatggctgtgca

SEQ ID NO: 7755 - RNA, 19 nt, synthetic construct
  source 1..19: mol_type = other RNA
ttaaggaaaatggctgtgc

SEQ ID NO: 7756 - RNA, 19 nt, synthetic construct
  source 1..19: mol_type = other RNA
tttaaggaaaatggctgtg

SEQ ID NO: 7757 - RNA, 19 nt, synthetic construct
  source 1..19: mol_type = other RNA
ctttaaggaaaatggctgt

SEQ ID NO: 7758 - RNA, 19 nt, synthetic construct
  source 1..19: mol_type = other RNA
cctttaaggaaaatggctg

SEQ ID NO: 7759 - RNA, 19 nt, synthetic construct
  source 1..19: mol_type = other RNA
tcctttaaggaaaatggct

SEQ ID NO: 7760 - RNA, 19 nt, synthetic construct
  source 1..19: mol_type = other RNA
ttcctttaaggaaaatggc

SEQ ID NO: 7761 - RNA, 19 nt, synthetic construct
  source 1..19: mol_type = other RNA
attcctttaaggaaaatgg

SEQ ID NO: 7762 - RNA, 19 nt, synthetic construct
  source 1..19: mol_type = other RNA
tattcctttaaggaaaatg

SEQ ID NO: 7763 - RNA, 19 nt, synthetic construct
  source 1..19: mol_type = other RNA
atattcctttaaggaaaat

SEQ ID NO: 7764 - RNA, 19 nt, synthetic construct
  source 1..19: mol_type = other RNA
aatattcctttaaggaaaa

SEQ ID NO: 7765 - RNA, 19 nt, synthetic construct
  source 1..19: mol_type = other RNA
aaatattcctttaaggaaa

SEQ ID NO: 7766 - RNA, 19 nt, synthetic construct
  source 1..19: mol_type = other RNA
taaatattcctttaaggaa

SEQ ID NO: 7767 - RNA, 19 nt, synthetic construct
  source 1..19: mol_type = other RNA
ctaaatattcctttaagga

SEQ ID NO: 7768 - RNA, 19 nt, synthetic construct
  source 1..19: mol_type = other RNA
tctaaatattcctttaagg

SEQ ID NO: 7769 - RNA, 19 nt, synthetic construct
  source 1..19: mol_type = other RNA
ttctaaatattcctttaag

SEQ ID NO: 7770 - RNA, 19 nt, synthetic construct
  source 1..19: mol_type = other RNA
tttctaaatattcctttaa

SEQ ID NO: 7771 - RNA, 19 nt, synthetic construct
  source 1..19: mol_type = other RNA
ctttctaaatattccttta

SEQ ID NO: 7772 - RNA, 19 nt, synthetic construct
  source 1..19: mol_type = other RNA
gctttctaaatattccttt

SEQ ID NO: 7773 - RNA, 19 nt, synthetic construct
  source 1..19: mol_type = other RNA
ggctttctaaatattcctt

SEQ ID NO: 7774 - RNA, 19 nt, synthetic construct
  source 1..19: mol_type = other RNA
tggctttctaaatattcct

SEQ ID NO: 7775 - RNA, 19 nt, synthetic construct
  source 1..19: mol_type = other RNA
ttggctttctaaatattcc

SEQ ID NO: 7776 - RNA, 19 nt, synthetic construct
  source 1..19: mol_type = other RNA
tttggctttctaaatattc

SEQ ID NO: 7777 - RNA, 19 nt, synthetic construct
  source 1..19: mol_type = other RNA
ctttggctttctaaatatt

SEQ ID NO: 7778 - RNA, 19 nt, synthetic construct
  source 1..19: mol_type = other RNA
actttggctttctaaatat

SEQ ID NO: 7779 - RNA, 19 nt, synthetic construct
  source 1..19: mol_type = other RNA
gactttggctttctaaata

SEQ ID NO: 7780 - RNA, 19 nt, synthetic construct
  source 1..19: mol_type = other RNA
tgactttggctttctaaat

SEQ ID NO: 7781 - RNA, 19 nt, synthetic construct
  source 1..19: mol_type = other RNA
ctgactttggctttctaaa

SEQ ID NO: 7782 - RNA, 19 nt, synthetic construct
  source 1..19: mol_type = other RNA
tctgactttggctttctaa

SEQ ID NO: 7783 - RNA, 19 nt, synthetic construct
  source 1..19: mol_type = other RNA
ttctgactttggctttcta

SEQ ID NO: 7784 - RNA, 19 nt, synthetic construct
  source 1..19: mol_type = other RNA
tttctgactttggctttct

SEQ ID NO: 7785 - RNA, 19 nt, synthetic construct
  source 1..19: mol_type = other RNA
gtttctgactttggctttc

SEQ ID NO: 7786 - RNA, 19 nt, synthetic construct
  source 1..19: mol_type = other RNA
ggtttctgactttggcttt

SEQ ID NO: 7787 - RNA, 19 nt, synthetic construct
  source 1..19: mol_type = other RNA
cggtttctgactttggctt

SEQ ID NO: 7788 - RNA, 19 nt, synthetic construct
  source 1..19: mol_type = other RNA
ccggtttctgactttggct

SEQ ID NO: 7789 - RNA, 19 nt, synthetic construct
  source 1..19: mol_type = other RNA
accggtttctgactttggc

SEQ ID NO: 7790 - RNA, 19 nt, synthetic construct
  source 1..19: mol_type = other RNA
caccggtttctgactttgg

SEQ ID NO: 7791 - RNA, 19 nt, synthetic construct
  source 1..19: mol_type = other RNA
acaccggtttctgactttg

SEQ ID NO: 7792 - RNA, 19 nt, synthetic construct
  source 1..19: mol_type = other RNA
gacaccggtttctgacttt

SEQ ID NO: 7793 - RNA, 19 nt, synthetic construct
  source 1..19: mol_type = other RNA
agacaccggtttctgactt

SEQ ID NO: 7794 - RNA, 19 nt, synthetic construct
  source 1..19: mol_type = other RNA
cagacaccggtttctgact

SEQ ID NO: 7795 - RNA, 19 nt, synthetic construct
  source 1..19: mol_type = other RNA
gcagacaccggtttctgac

SEQ ID NO: 7796 - RNA, 19 nt, synthetic construct
  source 1..19: mol_type = other RNA
agcagacaccggtttctga

SEQ ID NO: 7797 - RNA, 19 nt, synthetic construct
  source 1..19: mol_type = other RNA
gagcagacaccggtttctg

SEQ ID NO: 7798 - RNA, 19 nt, synthetic construct
  source 1..19: mol_type = other RNA
agagcagacaccggtttct

SEQ ID NO: 7799 - RNA, 19 nt, synthetic construct
  source 1..19: mol_type = other RNA
tagagcagacaccggtttc

SEQ ID NO: 7800 - RNA, 19 nt, synthetic construct
  source 1..19: mol_type = other RNA
gtagagcagacaccggttt

SEQ ID NO: 7801 - RNA, 19 nt, synthetic construct
  source 1..19: mol_type = other RNA
agtagagcagacaccggtt

SEQ ID NO: 7802 - RNA, 19 nt, synthetic construct
  source 1..19: mol_type = other RNA
aagtagagcagacaccggt

SEQ ID NO: 7803 - RNA, 19 nt, synthetic construct
  source 1..19: mol_type = other RNA
aaagtagagcagacaccgg

SEQ ID NO: 7804 - RNA, 19 nt, synthetic construct
  source 1..19: mol_type = other RNA
gaaagtagagcagacaccg

SEQ ID NO: 7805 - RNA, 19 nt, synthetic construct
  source 1..19: mol_type = other RNA
ggaaagtagagcagacacc

SEQ ID NO: 7806 - RNA, 19 nt, synthetic construct
  source 1..19: mol_type = other RNA
gggaaagtagagcagacac

SEQ ID NO: 7807 - RNA, 19 nt, synthetic construct
  source 1..19: mol_type = other RNA
agggaaagtagagcagaca

SEQ ID NO: 7808 - RNA, 19 nt, synthetic construct
  source 1..19: mol_type = other RNA
cagggaaagtagagcagac

SEQ ID NO: 7809 - RNA, 19 nt, synthetic construct
  source 1..19: mol_type = other RNA
ccagggaaagtagagcaga

SEQ ID NO: 7810 - RNA, 19 nt, synthetic construct
  source 1..19: mol_type = other RNA
tccagggaaagtagagcag

SEQ ID NO: 7811 - RNA, 19 nt, synthetic construct
  source 1..19: mol_type = other RNA
ctccagggaaagtagagca

SEQ ID NO: 7812 - RNA, 19 nt, synthetic construct
  source 1..19: mol_type = other RNA
gctccagggaaagtagagc

SEQ ID NO: 7813 - RNA, 19 nt, synthetic construct
  source 1..19: mol_type = other RNA
tgctccagggaaagtagag

SEQ ID NO: 7814 - RNA, 19 nt, synthetic construct
  source 1..19: mol_type = other RNA
ttgctccagggaaagtaga

SEQ ID NO: 7815 - RNA, 19 nt, synthetic construct
  source 1..19: mol_type = other RNA
cttgctccagggaaagtag

SEQ ID NO: 7816 - RNA, 19 nt, synthetic construct
  source 1..19: mol_type = other RNA
gcttgctccagggaaagta

SEQ ID NO: 7817 - RNA, 19 nt, synthetic construct
  source 1..19: mol_type = other RNA
cgcttgctccagggaaagt

SEQ ID NO: 7818 - RNA, 19 nt, synthetic construct
  source 1..19: mol_type = other RNA
acgcttgctccagggaaag

SEQ ID NO: 7819 - RNA, 19 nt, synthetic construct
  source 1..19: mol_type = other RNA
aacgcttgctccagggaaa

SEQ ID NO: 7820 - RNA, 19 nt, synthetic construct
  source 1..19: mol_type = other RNA
caacgcttgctccagggaa

SEQ ID NO: 7821 - RNA, 19 nt, synthetic construct
  source 1..19: mol_type = other RNA
acaacgcttgctccaggga

SEQ ID NO: 7822 - RNA, 19 nt, synthetic construct
  source 1..19: mol_type = other RNA
aacaacgcttgctccaggg

SEQ ID NO: 7823 - RNA, 19 nt, synthetic construct
  source 1..19: mol_type = other RNA
taacaacgcttgctccagg

SEQ ID NO: 7824 - RNA, 19 nt, synthetic construct
  source 1..19: mol_type = other RNA
gtaacaacgcttgctccag

SEQ ID NO: 7825 - RNA, 19 nt, synthetic construct
  source 1..19: mol_type = other RNA
ggtaacaacgcttgctcca

SEQ ID NO: 7826 - RNA, 19 nt, synthetic construct
  source 1..19: mol_type = other RNA
tggtaacaacgcttgctcc

SEQ ID NO: 7827 - RNA, 19 nt, synthetic construct
  source 1..19: mol_type = other RNA
ctggtaacaacgcttgctc

SEQ ID NO: 7828 - RNA, 19 nt, synthetic construct
  source 1..19: mol_type = other RNA
gctggtaacaacgcttgct

SEQ ID NO: 7829 - RNA, 19 nt, synthetic construct
  source 1..19: mol_type = other RNA
agctggtaacaacgcttgc

SEQ ID NO: 7830 - RNA, 19 nt, synthetic construct
  source 1..19: mol_type = other RNA
tagctggtaacaacgcttg

SEQ ID NO: 7831 - RNA, 19 nt, synthetic construct
  source 1..19: mol_type = other RNA
atagctggtaacaacgctt

SEQ ID NO: 7832 - RNA, 19 nt, synthetic construct
  source 1..19: mol_type = other RNA
tatagctggtaacaacgct

SEQ ID NO: 7833 - RNA, 19 nt, synthetic construct
  source 1..19: mol_type = other RNA
gtatagctggtaacaacgc

SEQ ID NO: 7834 - RNA, 19 nt, synthetic construct
  source 1..19: mol_type = other RNA
agtatagctggtaacaacg

SEQ ID NO: 7835 - RNA, 19 nt, synthetic construct
  source 1..19: mol_type = other RNA
aagtatagctggtaacaac

SEQ ID NO: 7836 - RNA, 19 nt, synthetic construct
  source 1..19: mol_type = other RNA
gaagtatagctggtaacaa

SEQ ID NO: 7837 - RNA, 19 nt, synthetic construct
  source 1..19: mol_type = other RNA
ggaagtatagctggtaaca

SEQ ID NO: 7838 - RNA, 19 nt, synthetic construct
  source 1..19: mol_type = other RNA
aggaagtatagctggtaac

SEQ ID NO: 7839 - RNA, 19 nt, synthetic construct
  source 1..19: mol_type = other RNA
aaggaagtatagctggtaa

SEQ ID NO: 7840 - RNA, 19 nt, synthetic construct
  source 1..19: mol_type = other RNA
gaaggaagtatagctggta

SEQ ID NO: 7841 - RNA, 19 nt, synthetic construct
  source 1..19: mol_type = other RNA
tgaaggaagtatagctggt

SEQ ID NO: 7842 - RNA, 19 nt, synthetic construct
  source 1..19: mol_type = other RNA
ttgaaggaagtatagctgg

SEQ ID NO: 7843 - RNA, 19 nt, synthetic construct
  source 1..19: mol_type = other RNA
cttgaaggaagtatagctg

SEQ ID NO: 7844 - RNA, 19 nt, synthetic construct
  source 1..19: mol_type = other RNA
tcttgaaggaagtatagct

SEQ ID NO: 7845 - RNA, 19 nt, synthetic construct
  source 1..19: mol_type = other RNA
gtcttgaaggaagtatagc

SEQ ID NO: 7846 - RNA, 19 nt, synthetic construct
  source 1..19: mol_type = other RNA
ggtcttgaaggaagtatag

SEQ ID NO: 7847 - RNA, 19 nt, synthetic construct
  source 1..19: mol_type = other RNA
gggtcttgaaggaagtata

SEQ ID NO: 7848 - RNA, 19 nt, synthetic construct
  source 1..19: mol_type = other RNA
tgggtcttgaaggaagtat

SEQ ID NO: 7849 - RNA, 19 nt, synthetic construct
  source 1..19: mol_type = other RNA
ctgggtcttgaaggaagta

SEQ ID NO: 7850 - RNA, 19 nt, synthetic construct
  source 1..19: mol_type = other RNA
actgggtcttgaaggaagt

SEQ ID NO: 7851 - RNA, 19 nt, synthetic construct
  source 1..19: mol_type = other RNA
cactgggtcttgaaggaag

SEQ ID NO: 7852 - RNA, 19 nt, synthetic construct
  source 1..19: mol_type = other RNA
tcactgggtcttgaaggaa

SEQ ID NO: 7853 - RNA, 19 nt, synthetic construct
  source 1..19: mol_type = other RNA
atcactgggtcttgaagga

SEQ ID NO: 7854 - RNA, 19 nt, synthetic construct
  source 1..19: mol_type = other RNA
catcactgggtcttgaagg

SEQ ID NO: 7855 - RNA, 19 nt, synthetic construct
  source 1..19: mol_type = other RNA
gcatcactgggtcttgaag

SEQ ID NO: 7856 - RNA, 19 nt, synthetic construct
  source 1..19: mol_type = other RNA
agcatcactgggtcttgaa

SEQ ID NO: 7857 - RNA, 19 nt, synthetic construct
  source 1..19: mol_type = other RNA
cagcatcactgggtcttga

SEQ ID NO: 7858 - RNA, 19 nt, synthetic construct
  source 1..19: mol_type = other RNA
gcagcatcactgggtcttg

SEQ ID NO: 7859 - RNA, 19 nt, synthetic construct
  source 1..19: mol_type = other RNA
agcagcatcactgggtctt

SEQ ID NO: 7860 - RNA, 19 nt, synthetic construct
  source 1..19: mol_type = other RNA
cagcagcatcactgggtct

SEQ ID NO: 7861 - RNA, 19 nt, synthetic construct
  source 1..19: mol_type = other RNA
tcagcagcatcactgggtc

SEQ ID NO: 7862 - RNA, 19 nt, synthetic construct
  source 1..19: mol_type = other RNA
atcagcagcatcactgggt

SEQ ID NO: 7863 - RNA, 19 nt, synthetic construct
  source 1..19: mol_type = other RNA
catcagcagcatcactggg

SEQ ID NO: 7864 - RNA, 19 nt, synthetic construct
  source 1..19: mol_type = other RNA
tcatcagcagcatcactgg

SEQ ID NO: 7865 - RNA, 19 nt, synthetic construct
  source 1..19: mol_type = other RNA
ttcatcagcagcatcactg

SEQ ID NO: 7866 - RNA, 19 nt, synthetic construct
  source 1..19: mol_type = other RNA
cttcatcagcagcatcact

SEQ ID NO: 7867 - RNA, 19 nt, synthetic construct
  source 1..19: mol_type = other RNA
ccttcatcagcagcatcac

SEQ ID NO: 7868 - RNA, 19 nt, synthetic construct
  source 1..19: mol_type = other RNA
accttcatcagcagcatca

SEQ ID NO: 7869 - RNA, 19 nt, synthetic construct
  source 1..19: mol_type = other RNA
taccttcatcagcagcatc

SEQ ID NO: 7870 - RNA, 19 nt, synthetic construct
  source 1..19: mol_type = other RNA
ctaccttcatcagcagcat

SEQ ID NO: 7871 - RNA, 19 nt, synthetic construct
  source 1..19: mol_type = other RNA
tctaccttcatcagcagca

SEQ ID NO: 7872 - RNA, 19 nt, synthetic construct
  source 1..19: mol_type = other RNA
ctctaccttcatcagcagc

SEQ ID NO: 7873 - RNA, 19 nt, synthetic construct
  source 1..19: mol_type = other RNA
tctctaccttcatcagcag

SEQ ID NO: 7874 - RNA, 19 nt, synthetic construct
  source 1..19: mol_type = other RNA
gtctctaccttcatcagca

SEQ ID NO: 7875 - RNA, 19 nt, synthetic construct
  source 1..19: mol_type = other RNA
tgtctctaccttcatcagc

SEQ ID NO: 7876 - RNA, 19 nt, synthetic construct
  source 1..19: mol_type = other RNA
gtgtctctaccttcatcag

SEQ ID NO: 7877 - RNA, 19 nt, synthetic construct
  source 1..19: mol_type = other RNA
cgtgtctctaccttcatca

SEQ ID NO: 7878 - RNA, 19 nt, synthetic construct
  source 1..19: mol_type = other RNA
acgtgtctctaccttcatc

SEQ ID NO: 7879 - RNA, 19 nt, synthetic construct
  source 1..19: mol_type = other RNA
gacgtgtctctaccttcat

SEQ ID NO: 7880 - RNA, 19 nt, synthetic construct
  source 1..19: mol_type = other RNA
ggacgtgtctctaccttca

SEQ ID NO: 7881 - RNA, 19 nt, synthetic construct
  source 1..19: mol_type = other RNA
tggacgtgtctctaccttc

SEQ ID NO: 7882 - RNA, 19 nt, synthetic construct
  source 1..19: mol_type = other RNA
atggacgtgtctctacctt

SEQ ID NO: 7883 - RNA, 19 nt, synthetic construct
  source 1..19: mol_type = other RNA
aatggacgtgtctctacct

SEQ ID NO: 7884 - RNA, 19 nt, synthetic construct
  source 1..19: mol_type = other RNA
taatggacgtgtctctacc

SEQ ID NO: 7885 - RNA, 19 nt, synthetic construct
  source 1..19: mol_type = other RNA
ttaatggacgtgtctctac

SEQ ID NO: 7886 - RNA, 19 nt, synthetic construct
  source 1..19: mol_type = other RNA
attaatggacgtgtctcta

SEQ ID NO: 7887 - RNA, 19 nt, synthetic construct
  source 1..19: mol_type = other RNA
cattaatggacgtgtctct

SEQ ID NO: 7888 - RNA, 19 nt, synthetic construct
  source 1..19: mol_type = other RNA
tcattaatggacgtgtctc

SEQ ID NO: 7889 - RNA, 19 nt, synthetic construct
  source 1..19: mol_type = other RNA
ctcattaatggacgtgtct

SEQ ID NO: 7890 - RNA, 19 nt, synthetic construct
  source 1..19: mol_type = other RNA
actcattaatggacgtgtc

SEQ ID NO: 7891 - RNA, 19 nt, synthetic construct
  source 1..19: mol_type = other RNA
gactcattaatggacgtgt

SEQ ID NO: 7892 - RNA, 19 nt, synthetic construct
  source 1..19: mol_type = other RNA
ggactcattaatggacgtg

SEQ ID NO: 7893 - RNA, 19 nt, synthetic construct
  source 1..19: mol_type = other RNA
tggactcattaatggacgt

SEQ ID NO: 7894 - RNA, 19 nt, synthetic construct
  source 1..19: mol_type = other RNA
ctggactcattaatggacg

SEQ ID NO: 7895 - RNA, 19 nt, synthetic construct
  source 1..19: mol_type = other RNA
tctggactcattaatggac

SEQ ID NO: 7896 - RNA, 19 nt, synthetic construct
  source 1..19: mol_type = other RNA
ttctggactcattaatgga

SEQ ID NO: 7897 - RNA, 19 nt, synthetic construct
  source 1..19: mol_type = other RNA
tttctggactcattaatgg

SEQ ID NO: 7898 - RNA, 19 nt, synthetic construct
  source 1..19: mol_type = other RNA
atttctggactcattaatg

SEQ ID NO: 7899 - RNA, 19 nt, synthetic construct
  source 1..19: mol_type = other RNA
catttctggactcattaat

SEQ ID NO: 7900 - RNA, 19 nt, synthetic construct
  source 1..19: mol_type = other RNA
gcatttctggactcattaa

SEQ ID NO: 7901 - RNA, 19 nt, synthetic construct
  source 1..19: mol_type = other RNA
tgcatttctggactcatta

SEQ ID NO: 7902 - RNA, 19 nt, synthetic construct
  source 1..19: mol_type = other RNA
ttgcatttctggactcatt

SEQ ID NO: 7903 - RNA, 19 nt, synthetic construct
  source 1..19: mol_type = other RNA
gttgcatttctggactcat

SEQ ID NO: 7904 - RNA, 19 nt, synthetic construct
  source 1..19: mol_type = other RNA
tgttgcatttctggactca

SEQ ID NO: 7905 - RNA, 19 nt, synthetic construct
  source 1..19: mol_type = other RNA
ctgttgcatttctggactc

SEQ ID NO: 7906 - RNA, 19 nt, synthetic construct
  source 1..19: mol_type = other RNA
tctgttgcatttctggact

SEQ ID NO: 7907 - RNA, 19 nt, synthetic construct
  source 1..19: mol_type = other RNA
atctgttgcatttctggac

SEQ ID NO: 7908 - RNA, 19 nt, synthetic construct
  source 1..19: mol_type = other RNA
catctgttgcatttctgga

SEQ ID NO: 7909 - RNA, 19 nt, synthetic construct
  source 1..19: mol_type = other RNA
tcatctgttgcatttctgg

SEQ ID NO: 7910 - RNA, 19 nt, synthetic construct
  source 1..19: mol_type = other RNA
ttcatctgttgcatttctg

SEQ ID NO: 7911 - RNA, 19 nt, synthetic construct
  source 1..19: mol_type = other RNA
attcatctgttgcatttct

SEQ ID NO: 7912 - RNA, 19 nt, synthetic construct
  source 1..19: mol_type = other RNA
gattcatctgttgcatttc

SEQ ID NO: 7913 - RNA, 19 nt, synthetic construct
  source 1..19: mol_type = other RNA
ggattcatctgttgcattt

SEQ ID NO: 7914 - RNA, 19 nt, synthetic construct
  source 1..19: mol_type = other RNA
gggattcatctgttgcatt

SEQ ID NO: 7915 - RNA, 19 nt, synthetic construct
  source 1..19: mol_type = other RNA
agggattcatctgttgcat

SEQ ID NO: 7916 - RNA, 19 nt, synthetic construct
  source 1..19: mol_type = other RNA
tagggattcatctgttgca

SEQ ID NO: 7917 - RNA, 19 nt, synthetic construct
  source 1..19: mol_type = other RNA
gtagggattcatctgttgc

SEQ ID NO: 7918 - RNA, 19 nt, synthetic construct
  source 1..19: mol_type = other RNA
cgtagggattcatctgttg

SEQ ID NO: 7919 - RNA, 19 nt, synthetic construct
  source 1..19: mol_type = other RNA
tcgtagggattcatctgtt

SEQ ID NO: 7920 - RNA, 19 nt, synthetic construct
  source 1..19: mol_type = other RNA
ttcgtagggattcatctgt

SEQ ID NO: 7921 - RNA, 19 nt, synthetic construct
  source 1..19: mol_type = other RNA
cttcgtagggattcatctg

SEQ ID NO: 7922 - RNA, 19 nt, synthetic construct
  source 1..19: mol_type = other RNA
ccttcgtagggattcatct

SEQ ID NO: 7923 - RNA, 19 nt, synthetic construct
  source 1..19: mol_type = other RNA
tccttcgtagggattcatc

SEQ ID NO: 7924 - RNA, 19 nt, synthetic construct
  source 1..19: mol_type = other RNA
ctccttcgtagggattcat

SEQ ID NO: 7925 - RNA, 19 nt, synthetic construct
  source 1..19: mol_type = other RNA
cctccttcgtagggattca

SEQ ID NO: 7926 - RNA, 19 nt, synthetic construct
  source 1..19: mol_type = other RNA
acctccttcgtagggattc

SEQ ID NO: 7927 - RNA, 19 nt, synthetic construct
  source 1..19: mol_type = other RNA
aacctccttcgtagggatt

SEQ ID NO: 7928 - RNA, 19 nt, synthetic construct
  source 1..19: mol_type = other RNA
caacctccttcgtagggat

SEQ ID NO: 7929 - RNA, 19 nt, synthetic construct
  source 1..19: mol_type = other RNA
tcaacctccttcgtaggga

SEQ ID NO: 7930 - RNA, 19 nt, synthetic construct
  source 1..19: mol_type = other RNA
atcaacctccttcgtaggg

SEQ ID NO: 7931 - RNA, 19 nt, synthetic construct
  source 1..19: mol_type = other RNA
aatcaacctccttcgtagg

SEQ ID NO: 7932 - RNA, 19 nt, synthetic construct
  source 1..19: mol_type = other RNA
caatcaacctccttcgtag

SEQ ID NO: 7933 - RNA, 19 nt, synthetic construct
  source 1..19: mol_type = other RNA
gcaatcaacctccttcgta

SEQ ID NO: 7934 - RNA, 19 nt, synthetic construct
  source 1..19: mol_type = other RNA
tgcaatcaacctccttcgt

SEQ ID NO: 7935 - RNA, 19 nt, synthetic construct
  source 1..19: mol_type = other RNA
ttgcaatcaacctccttcg

SEQ ID NO: 7936 - RNA, 19 nt, synthetic construct
  source 1..19: mol_type = other RNA
tttgcaatcaacctccttc

SEQ ID NO: 7937 - RNA, 19 nt, synthetic construct
  source 1..19: mol_type = other RNA
atttgcaatcaacctcctt

SEQ ID NO: 7938 - RNA, 19 nt, synthetic construct
  source 1..19: mol_type = other RNA
gatttgcaatcaacctcct

SEQ ID NO: 7939 - RNA, 19 nt, synthetic construct
  source 1..19: mol_type = other RNA
agatttgcaatcaacctcc

SEQ ID NO: 7940 - RNA, 19 nt, synthetic construct
  source 1..19: mol_type = other RNA
cagatttgcaatcaacctc

SEQ ID NO: 7941 - RNA, 19 nt, synthetic construct
  source 1..19: mol_type = other RNA
ccagatttgcaatcaacct

SEQ ID NO: 7942 - RNA, 19 nt, synthetic construct
  source 1..19: mol_type = other RNA
gccagatttgcaatcaacc

SEQ ID NO: 7943 - RNA, 19 nt, synthetic construct
  source 1..19: mol_type = other RNA
agccagatttgcaatcaac

SEQ ID NO: 7944 - RNA, 19 nt, synthetic construct
  source 1..19: mol_type = other RNA
cagccagatttgcaatcaa

SEQ ID NO: 7945 - RNA, 19 nt, synthetic construct
  source 1..19: mol_type = other RNA
tcagccagatttgcaatca

SEQ ID NO: 7946 - RNA, 19 nt, synthetic construct
  source 1..19: mol_type = other RNA
ctcagccagatttgcaatc

SEQ ID NO: 7947 - RNA, 19 nt, synthetic construct
  source 1..19: mol_type = other RNA
gctcagccagatttgcaat

SEQ ID NO: 7948 - RNA, 19 nt, synthetic construct
  source 1..19: mol_type = other RNA
tgctcagccagatttgcaa

SEQ ID NO: 7949 - RNA, 19 nt, synthetic construct
  source 1..19: mol_type = other RNA
atgctcagccagatttgca

SEQ ID NO: 7950 - RNA, 19 nt, synthetic construct
  source 1..19: mol_type = other RNA
tatgctcagccagatttgc

SEQ ID NO: 7951 - RNA, 19 nt, synthetic construct
  source 1..19: mol_type = other RNA
atatgctcagccagatttg

SEQ ID NO: 7952 - RNA, 19 nt, synthetic construct
  source 1..19: mol_type = other RNA
aatatgctcagccagattt

SEQ ID NO: 7953 - RNA, 19 nt, synthetic construct
  source 1..19: mol_type = other RNA
gaatatgctcagccagatt

SEQ ID NO: 7954 - RNA, 19 nt, synthetic construct
  source 1..19: mol_type = other RNA
agaatatgctcagccagat

SEQ ID NO: 7955 - RNA, 19 nt, synthetic construct
  source 1..19: mol_type = other RNA
tagaatatgctcagccaga

SEQ ID NO: 7956 - RNA, 19 nt, synthetic construct
  source 1..19: mol_type = other RNA
atagaatatgctcagccag

SEQ ID NO: 7957 - RNA, 19 nt, synthetic construct
  source 1..19: mol_type = other RNA
aatagaatatgctcagcca

SEQ ID NO: 7958 - RNA, 19 nt, synthetic construct
  source 1..19: mol_type = other RNA
gaatagaatatgctcagcc

SEQ ID NO: 7959 - RNA, 19 nt, synthetic construct
  source 1..19: mol_type = other RNA
tgaatagaatatgctcagc

SEQ ID NO: 7960 - RNA, 19 nt, synthetic construct
  source 1..19: mol_type = other RNA
gtgaatagaatatgctcag

SEQ ID NO: 7961 - RNA, 19 nt, synthetic construct
  source 1..19: mol_type = other RNA
agtgaatagaatatgctca

SEQ ID NO: 7962 - RNA, 19 nt, synthetic construct
  source 1..19: mol_type = other RNA
cagtgaatagaatatgctc

SEQ ID NO: 7963 - RNA, 19 nt, synthetic construct
  source 1..19: mol_type = other RNA
gcagtgaatagaatatgct

SEQ ID NO: 7964 - RNA, 19 nt, synthetic construct
  source 1..19: mol_type = other RNA
agcagtgaatagaatatgc

SEQ ID NO: 7965 - RNA, 19 nt, synthetic construct
  source 1..19: mol_type = other RNA
tagcagtgaatagaatatg

SEQ ID NO: 7966 - RNA, 19 nt, synthetic construct
  source 1..19: mol_type = other RNA
ctagcagtgaatagaatat

SEQ ID NO: 7967 - RNA, 19 nt, synthetic construct
  source 1..19: mol_type = other RNA
gctagcagtgaatagaata

SEQ ID NO: 7968 - RNA, 19 nt, synthetic construct
  source 1..19: mol_type = other RNA
tgctagcagtgaatagaat

SEQ ID NO: 7969 - RNA, 19 nt, synthetic construct
  source 1..19: mol_type = other RNA
ttgctagcagtgaatagaa

SEQ ID NO: 7970 - RNA, 19 nt, synthetic construct
  source 1..19: mol_type = other RNA
cttgctagcagtgaataga

SEQ ID NO: 7971 - RNA, 19 nt, synthetic construct
  source 1..19: mol_type = other RNA
acttgctagcagtgaatag

SEQ ID NO: 7972 - RNA, 19 nt, synthetic construct
  source 1..19: mol_type = other RNA
gacttgctagcagtgaata

SEQ ID NO: 7973 - RNA, 19 nt, synthetic construct
  source 1..19: mol_type = other RNA
ggacttgctagcagtgaat

SEQ ID NO: 7974 - RNA, 19 nt, synthetic construct
  source 1..19: mol_type = other RNA
aggacttgctagcagtgaa

SEQ ID NO: 7975 - RNA, 19 nt, synthetic construct
  source 1..19: mol_type = other RNA
caggacttgctagcagtga

SEQ ID NO: 7976 - RNA, 19 nt, synthetic construct
  source 1..19: mol_type = other RNA
acaggacttgctagcagtg

SEQ ID NO: 7977 - RNA, 19 nt, synthetic construct
  source 1..19: mol_type = other RNA
cacaggacttgctagcagt

SEQ ID NO: 7978 - RNA, 19 nt, synthetic construct
  source 1..19: mol_type = other RNA
gcacaggacttgctagcag

SEQ ID NO: 7979 - RNA, 19 nt, synthetic construct
  source 1..19: mol_type = other RNA
ggcacaggacttgctagca

SEQ ID NO: 7980 - RNA, 19 nt, synthetic construct
  source 1..19: mol_type = other RNA
tggcacaggacttgctagc

SEQ ID NO: 7981 - RNA, 19 nt, synthetic construct
  source 1..19: mol_type = other RNA
atggcacaggacttgctag

SEQ ID NO: 7982 - RNA, 19 nt, synthetic construct
  source 1..19: mol_type = other RNA
aatggcacaggacttgcta

SEQ ID NO: 7983 - RNA, 19 nt, synthetic construct
  source 1..19: mol_type = other RNA
taatggcacaggacttgct

SEQ ID NO: 7984 - RNA, 19 nt, synthetic construct
  source 1..19: mol_type = other RNA
ataatggcacaggacttgc

SEQ ID NO: 7985 - RNA, 19 nt, synthetic construct
  source 1..19: mol_type = other RNA
cataatggcacaggacttg

SEQ ID NO: 7986 - RNA, 19 nt, synthetic construct
  source 1..19: mol_type = other RNA
acataatggcacaggactt

SEQ ID NO: 7987 - RNA, 19 nt, synthetic construct
  source 1..19: mol_type = other RNA
gacataatggcacaggact

SEQ ID NO: 7988 - RNA, 19 nt, synthetic construct
  source 1..19: mol_type = other RNA
ggacataatggcacaggac

SEQ ID NO: 7989 - RNA, 19 nt, synthetic construct
  source 1..19: mol_type = other RNA
tggacataatggcacagga

SEQ ID NO: 7990 - RNA, 19 nt, synthetic construct
  source 1..19: mol_type = other RNA
gtggacataatggcacagg

SEQ ID NO: 7991 - RNA, 19 nt, synthetic construct
  source 1..19: mol_type = other RNA
tgtggacataatggcacag

SEQ ID NO: 7992 - RNA, 19 nt, synthetic construct
  source 1..19: mol_type = other RNA
gtgtggacataatggcaca

SEQ ID NO: 7993 - RNA, 19 nt, synthetic construct
  source 1..19: mol_type = other RNA
tgtgtggacataatggcac

SEQ ID NO: 7994 - RNA, 19 nt, synthetic construct
  source 1..19: mol_type = other RNA
gtgtgtggacataatggca

SEQ ID NO: 7995 - RNA, 19 nt, synthetic construct
  source 1..19: mol_type = other RNA
tgtgtgtggacataatggc

SEQ ID NO: 7996 - RNA, 19 nt, synthetic construct
  source 1..19: mol_type = other RNA
atgtgtgtggacataatgg

SEQ ID NO: 7997 - RNA, 19 nt, synthetic construct
  source 1..19: mol_type = other RNA
aatgtgtgtggacataatg

SEQ ID NO: 7998 - RNA, 19 nt, synthetic construct
  source 1..19: mol_type = other RNA
caatgtgtgtggacataat

SEQ ID NO: 7999 - RNA, 19 nt, synthetic construct
  source 1..19: mol_type = other RNA
acaatgtgtgtggacataa

SEQ ID NO: 8000 - RNA, 19 nt, synthetic construct
  source 1..19: mol_type = other RNA
cacaatgtgtgtggacata

SEQ ID NO: 8001 - RNA, 19 nt, synthetic construct
  source 1..19: mol_type = other RNA
ccacaatgtgtgtggacat

SEQ ID NO: 8002 - RNA, 19 nt, synthetic construct
  source 1..19: mol_type = other RNA
gccacaatgtgtgtggaca

SEQ ID NO: 8003 - RNA, 19 nt, synthetic construct
  source 1..19: mol_type = other RNA
agccacaatgtgtgtggac

SEQ ID NO: 8004 - RNA, 19 nt, synthetic construct
  source 1..19: mol_type = other RNA
aagccacaatgtgtgtgga

SEQ ID NO: 8005 - RNA, 19 nt, synthetic construct
  source 1..19: mol_type = other RNA
caagccacaatgtgtgtgg

SEQ ID NO: 8006 - RNA, 19 nt, synthetic construct
  source 1..19: mol_type = other RNA
gcaagccacaatgtgtgtg

SEQ ID NO: 8007 - RNA, 19 nt, synthetic construct
  source 1..19: mol_type = other RNA
ggcaagccacaatgtgtgt

SEQ ID NO: 8008 - RNA, 19 nt, synthetic construct
  source 1..19: mol_type = other RNA
aggcaagccacaatgtgtg

SEQ ID NO: 8009 - RNA, 19 nt, synthetic construct
  source 1..19: mol_type = other RNA
caggcaagccacaatgtgt

SEQ ID NO: 8010 - RNA, 19 nt, synthetic construct
  source 1..19: mol_type = other RNA
gcaggcaagccacaatgtg

SEQ ID NO: 8011 - RNA, 19 nt, synthetic construct
  source 1..19: mol_type = other RNA
agcaggcaagccacaatgt

SEQ ID NO: 8012 - RNA, 19 nt, synthetic construct
  source 1..19: mol_type = other RNA
gagcaggcaagccacaatg

SEQ ID NO: 8013 - RNA, 19 nt, synthetic construct
  source 1..19: mol_type = other RNA
ggagcaggcaagccacaat

SEQ ID NO: 8014 - RNA, 19 nt, synthetic construct
  source 1..19: mol_type = other RNA
aggagcaggcaagccacaa

SEQ ID NO: 8015 - RNA, 19 nt, synthetic construct
  source 1..19: mol_type = other RNA
gaggagcaggcaagccaca

SEQ ID NO: 8016 - RNA, 19 nt, synthetic construct
  source 1..19: mol_type = other RNA
agaggagcaggcaagccac

SEQ ID NO: 8017 - RNA, 19 nt, synthetic construct
  source 1..19: mol_type = other RNA
tagaggagcaggcaagcca

SEQ ID NO: 8018 - RNA, 19 nt, synthetic construct
  source 1..19: mol_type = other RNA
gtagaggagcaggcaagcc

SEQ ID NO: 8019 - RNA, 19 nt, synthetic construct
  source 1..19: mol_type = other RNA
tgtagaggagcaggcaagc

SEQ ID NO: 8020 - RNA, 19 nt, synthetic construct
  source 1..19: mol_type = other RNA
ctgtagaggagcaggcaag

SEQ ID NO: 8021 - RNA, 19 nt, synthetic construct
  source 1..19: mol_type = other RNA
tctgtagaggagcaggcaa

SEQ ID NO: 8022 - RNA, 19 nt, synthetic construct
  source 1..19: mol_type = other RNA
gtctgtagaggagcaggca

SEQ ID NO: 8023 - RNA, 19 nt, synthetic construct
  source 1..19: mol_type = other RNA
tgtctgtagaggagcaggc

SEQ ID NO: 8024 - RNA, 19 nt, synthetic construct
  source 1..19: mol_type = other RNA
gtgtctgtagaggagcagg

SEQ ID NO: 8025 - RNA, 19 nt, synthetic construct
  source 1..19: mol_type = other RNA
tgtgtctgtagaggagcag

SEQ ID NO: 8026 - RNA, 19 nt, synthetic construct
  source 1..19: mol_type = other RNA
ctgtgtctgtagaggagca

SEQ ID NO: 8027 - RNA, 19 nt, synthetic construct
  source 1..19: mol_type = other RNA
cctgtgtctgtagaggagc

SEQ ID NO: 8028 - RNA, 19 nt, synthetic construct
  source 1..19: mol_type = other RNA
gcctgtgtctgtagaggag

SEQ ID NO: 8029 - RNA, 19 nt, synthetic construct
  source 1..19: mol_type = other RNA
tgcctgtgtctgtagagga

SEQ ID NO: 8030 - RNA, 19 nt, synthetic construct
  source 1..19: mol_type = other RNA
ctgcctgtgtctgtagagg

SEQ ID NO: 8031 - RNA, 19 nt, synthetic construct
  source 1..19: mol_type = other RNA
cctgcctgtgtctgtagag

SEQ ID NO: 8032 - RNA, 19 nt, synthetic construct
  source 1..19: mol_type = other RNA
ccctgcctgtgtctgtaga

SEQ ID NO: 8033 - RNA, 19 nt, synthetic construct
  source 1..19: mol_type = other RNA
tccctgcctgtgtctgtag

SEQ ID NO: 8034 - RNA, 19 nt, synthetic construct
  source 1..19: mol_type = other RNA
ttccctgcctgtgtctgta

SEQ ID NO: 8035 - RNA, 19 nt, synthetic construct
  source 1..19: mol_type = other RNA
attccctgcctgtgtctgt

SEQ ID NO: 8036 - RNA, 19 nt, synthetic construct
  source 1..19: mol_type = other RNA
aattccctgcctgtgtctg

SEQ ID NO: 8037 - RNA, 19 nt, synthetic construct
  source 1..19: mol_type = other RNA
caattccctgcctgtgtct

SEQ ID NO: 8038 - RNA, 19 nt, synthetic construct
  source 1..19: mol_type = other RNA
tcaattccctgcctgtgtc

SEQ ID NO: 8039 - RNA, 19 nt, synthetic construct
  source 1..19: mol_type = other RNA
atcaattccctgcctgtgt

SEQ ID NO: 8040 - RNA, 19 nt, synthetic construct
  source 1..19: mol_type = other RNA
gatcaattccctgcctgtg

SEQ ID NO: 8041 - RNA, 19 nt, synthetic construct
  source 1..19: mol_type = other RNA
agatcaattccctgcctgt

SEQ ID NO: 8042 - RNA, 19 nt, synthetic construct
  source 1..19: mol_type = other RNA
gagatcaattccctgcctg

SEQ ID NO: 8043 - RNA, 19 nt, synthetic construct
  source 1..19: mol_type = other RNA
agagatcaattccctgcct

SEQ ID NO: 8044 - RNA, 19 nt, synthetic construct
  source 1..19: mol_type = other RNA
gagagatcaattccctgcc

SEQ ID NO: 8045 - RNA, 19 nt, synthetic construct
  source 1..19: mol_type = other RNA
ggagagatcaattccctgc

SEQ ID NO: 8046 - RNA, 19 nt, synthetic construct
  source 1..19: mol_type = other RNA
tggagagatcaattccctg

SEQ ID NO: 8047 - RNA, 19 nt, synthetic construct
  source 1..19: mol_type = other RNA
gtggagagatcaattccct

SEQ ID NO: 8048 - RNA, 19 nt, synthetic construct
  source 1..19: mol_type = other RNA
tgtggagagatcaattccc

SEQ ID NO: 8049 - RNA, 19 nt, synthetic construct
  source 1..19: mol_type = other RNA
atgtggagagatcaattcc

SEQ ID NO: 8050 - RNA, 19 nt, synthetic construct
  source 1..19: mol_type = other RNA
aatgtggagagatcaattc

SEQ ID NO: 8051 - RNA, 19 nt, synthetic construct
  source 1..19: mol_type = other RNA
caatgtggagagatcaatt

SEQ ID NO: 8052 - RNA, 19 nt, synthetic construct
  source 1..19: mol_type = other RNA
ccaatgtggagagatcaat

SEQ ID NO: 8053 - RNA, 19 nt, synthetic construct
  source 1..19: mol_type = other RNA
accaatgtggagagatcaa

SEQ ID NO: 8054 - RNA, 19 nt, synthetic construct
  source 1..19: mol_type = other RNA
gaccaatgtggagagatca

SEQ ID NO: 8055 - RNA, 19 nt, synthetic construct
  source 1..19: mol_type = other RNA
cgaccaatgtggagagatc

SEQ ID NO: 8056 - RNA, 19 nt, synthetic construct
  source 1..19: mol_type = other RNA
tcgaccaatgtggagagat

SEQ ID NO: 8057 - RNA, 19 nt, synthetic construct
  source 1..19: mol_type = other RNA
ttcgaccaatgtggagaga

SEQ ID NO: 8058 - RNA, 19 nt, synthetic construct
  source 1..19: mol_type = other RNA
cttcgaccaatgtggagag

SEQ ID NO: 8059 - RNA, 19 nt, synthetic construct
  source 1..19: mol_type = other RNA
tcttcgaccaatgtggaga

SEQ ID NO: 8060 - RNA, 19 nt, synthetic construct
  source 1..19: mol_type = other RNA
gtcttcgaccaatgtggag

SEQ ID NO: 8061 - RNA, 19 nt, synthetic construct
  source 1..19: mol_type = other RNA
agtcttcgaccaatgtgga

SEQ ID NO: 8062 - RNA, 19 nt, synthetic construct
  source 1..19: mol_type = other RNA
aagtcttcgaccaatgtgg

SEQ ID NO: 8063 - RNA, 19 nt, synthetic construct
  source 1..19: mol_type = other RNA
gaagtcttcgaccaatgtg

SEQ ID NO: 8064 - RNA, 19 nt, synthetic construct
  source 1..19: mol_type = other RNA
agaagtcttcgaccaatgt

SEQ ID NO: 8065 - RNA, 19 nt, synthetic construct
  source 1..19: mol_type = other RNA
aagaagtcttcgaccaatg

SEQ ID NO: 8066 - RNA, 19 nt, synthetic construct
  source 1..19: mol_type = other RNA
aaagaagtcttcgaccaat

SEQ ID NO: 8067 - RNA, 19 nt, synthetic construct
  source 1..19: mol_type = other RNA
caaagaagtcttcgaccaa

SEQ ID NO: 8068 - RNA, 19 nt, synthetic construct
  source 1..19: mol_type = other RNA
acaaagaagtcttcgacca

SEQ ID NO: 8069 - RNA, 19 nt, synthetic construct
  source 1..19: mol_type = other RNA
cacaaagaagtcttcgacc

SEQ ID NO: 8070 - RNA, 19 nt, synthetic construct
  source 1..19: mol_type = other RNA
tcacaaagaagtcttcgac

SEQ ID NO: 8071 - RNA, 19 nt, synthetic construct
  source 1..19: mol_type = other RNA
atcacaaagaagtcttcga

SEQ ID NO: 8072 - RNA, 19 nt, synthetic construct
  source 1..19: mol_type = other RNA
catcacaaagaagtcttcg

SEQ ID NO: 8073 - RNA, 19 nt, synthetic construct
  source 1..19: mol_type = other RNA
tcatcacaaagaagtcttc

SEQ ID NO: 8074 - RNA, 19 nt, synthetic construct
  source 1..19: mol_type = other RNA
ttcatcacaaagaagtctt

SEQ ID NO: 8075 - RNA, 19 nt, synthetic construct
  source 1..19: mol_type = other RNA
tttcatcacaaagaagtct

SEQ ID NO: 8076 - RNA, 19 nt, synthetic construct
  source 1..19: mol_type = other RNA
ctttcatcacaaagaagtc

SEQ ID NO: 8077 - RNA, 19 nt, synthetic construct
  source 1..19: mol_type = other RNA
tctttcatcacaaagaagt

SEQ ID NO: 8078 - RNA, 19 nt, synthetic construct
  source 1..19: mol_type = other RNA
ctctttcatcacaaagaag

SEQ ID NO: 8079 - RNA, 19 nt, synthetic construct
  source 1..19: mol_type = other RNA
cctctttcatcacaaagaa

SEQ ID NO: 8080 - RNA, 19 nt, synthetic construct
  source 1..19: mol_type = other RNA
tcctctttcatcacaaaga

SEQ ID NO: 8081 - RNA, 19 nt, synthetic construct
  source 1..19: mol_type = other RNA
ttcctctttcatcacaaag

SEQ ID NO: 8082 - RNA, 19 nt, synthetic construct
  source 1..19: mol_type = other RNA
cttcctctttcatcacaaa

SEQ ID NO: 8083 - RNA, 19 nt, synthetic construct
  source 1..19: mol_type = other RNA
acttcctctttcatcacaa

SEQ ID NO: 8084 - RNA, 19 nt, synthetic construct
  source 1..19: mol_type = other RNA
gacttcctctttcatcaca

SEQ ID NO: 8085 - RNA, 19 nt, synthetic construct
  source 1..19: mol_type = other RNA
ggacttcctctttcatcac

SEQ ID NO: 8086 - RNA, 19 nt, synthetic construct
  source 1..19: mol_type = other RNA
aggacttcctctttcatca

SEQ ID NO: 8087 - RNA, 19 nt, synthetic construct
  source 1..19: mol_type = other RNA
caggacttcctctttcatc

SEQ ID NO: 8088 - RNA, 19 nt, synthetic construct
  source 1..19: mol_type = other RNA
ccaggacttcctctttcat

SEQ ID NO: 8089 - RNA, 19 nt, synthetic construct
  source 1..19: mol_type = other RNA
gccaggacttcctctttca

SEQ ID NO: 8090 - RNA, 19 nt, synthetic construct
  source 1..19: mol_type = other RNA
agccaggacttcctctttc

SEQ ID NO: 8091 - RNA, 19 nt, synthetic construct
  source 1..19: mol_type = other RNA
gagccaggacttcctcttt

SEQ ID NO: 8092 - RNA, 19 nt, synthetic construct
  source 1..19: mol_type = other RNA
cgagccaggacttcctctt

SEQ ID NO: 8093 - RNA, 19 nt, synthetic construct
  source 1..19: mol_type = other RNA
acgagccaggacttcctct

SEQ ID NO: 8094 - RNA, 19 nt, synthetic construct
  source 1..19: mol_type = other RNA
cacgagccaggacttcctc

SEQ ID NO: 8095 - RNA, 19 nt, synthetic construct
  source 1..19: mol_type = other RNA
tcacgagccaggacttcct

SEQ ID NO: 8096 - RNA, 19 nt, synthetic construct
  source 1..19: mol_type = other RNA
atcacgagccaggacttcc

SEQ ID NO: 8097 - RNA, 19 nt, synthetic construct
  source 1..19: mol_type = other RNA
aatcacgagccaggacttc

SEQ ID NO: 8098 - RNA, 19 nt, synthetic construct
  source 1..19: mol_type = other RNA
aaatcacgagccaggactt

SEQ ID NO: 8099 - RNA, 19 nt, synthetic construct
  source 1..19: mol_type = other RNA
aaaatcacgagccaggact

SEQ ID NO: 8100 - RNA, 19 nt, synthetic construct
  source 1..19: mol_type = other RNA
caaaatcacgagccaggac

SEQ ID NO: 8101 - RNA, 19 nt, synthetic construct
  source 1..19: mol_type = other RNA
tcaaaatcacgagccagga

SEQ ID NO: 8102 - RNA, 19 nt, synthetic construct
  source 1..19: mol_type = other RNA
gtcaaaatcacgagccagg

SEQ ID NO: 8103 - RNA, 19 nt, synthetic construct
  source 1..19: mol_type = other RNA
ggtcaaaatcacgagccag

SEQ ID NO: 8104 - RNA, 19 nt, synthetic construct
  source 1..19: mol_type = other RNA
aggtcaaaatcacgagcca

SEQ ID NO: 8105 - RNA, 19 nt, synthetic construct
  source 1..19: mol_type = other RNA
caggtcaaaatcacgagcc

SEQ ID NO: 8106 - RNA, 19 nt, synthetic construct
  source 1..19: mol_type = other RNA
ccaggtcaaaatcacgagc

SEQ ID NO: 8107 - RNA, 19 nt, synthetic construct
  source 1..19: mol_type = other RNA
cccaggtcaaaatcacgag

SEQ ID NO: 8108 - RNA, 19 nt, synthetic construct
  source 1..19: mol_type = other RNA
ccccaggtcaaaatcacga

SEQ ID NO: 8109 - RNA, 19 nt, synthetic construct
  source 1..19: mol_type = other RNA
accccaggtcaaaatcacg

SEQ ID NO: 8110 - RNA, 19 nt, synthetic construct
  source 1..19: mol_type = other RNA
aaccccaggtcaaaatcac

SEQ ID NO: 8111 - RNA, 19 nt, synthetic construct
  source 1..19: mol_type = other RNA
gaaccccaggtcaaaatca

SEQ ID NO: 8112 - RNA, 19 nt, synthetic construct
  source 1..19: mol_type = other RNA
agaaccccaggtcaaaatc

SEQ ID NO: 8113 - RNA, 19 nt, synthetic construct
  source 1..19: mol_type = other RNA
gagaaccccaggtcaaaat

SEQ ID NO: 8114 - RNA, 19 nt, synthetic construct
  source 1..19: mol_type = other RNA
tgagaaccccaggtcaaaa

SEQ ID NO: 8115 - RNA, 19 nt, synthetic construct
  source 1..19: mol_type = other RNA
ctgagaaccccaggtcaaa

SEQ ID NO: 8116 - RNA, 19 nt, synthetic construct
  source 1..19: mol_type = other RNA
cctgagaaccccaggtcaa

SEQ ID NO: 8117 - RNA, 19 nt, synthetic construct
  source 1..19: mol_type = other RNA
tcctgagaaccccaggtca

SEQ ID NO: 8118 - RNA, 19 nt, synthetic construct
  source 1..19: mol_type = other RNA
ttcctgagaaccccaggtc

SEQ ID NO: 8119 - RNA, 19 nt, synthetic construct
  source 1..19: mol_type = other RNA
tttcctgagaaccccaggt

SEQ ID NO: 8120 - RNA, 19 nt, synthetic construct
  source 1..19: mol_type = other RNA
atttcctgagaaccccagg

SEQ ID NO: 8121 - RNA, 19 nt, synthetic construct
  source 1..19: mol_type = other RNA
aatttcctgagaaccccag

SEQ ID NO: 8122 - RNA, 19 nt, synthetic construct
  source 1..19: mol_type = other RNA
gaatttcctgagaacccca

SEQ ID NO: 8123 - RNA, 19 nt, synthetic construct
  source 1..19: mol_type = other RNA
tgaatttcctgagaacccc

SEQ ID NO: 8124 - RNA, 19 nt, synthetic construct
  source 1..19: mol_type = other RNA
ctgaatttcctgagaaccc

SEQ ID NO: 8125 - RNA, 19 nt, synthetic construct
  source 1..19: mol_type = other RNA
tctgaatttcctgagaacc

SEQ ID NO: 8126 - RNA, 19 nt, synthetic construct
  source 1..19: mol_type = other RNA
ttctgaatttcctgagaac

SEQ ID NO: 8127 - RNA, 19 nt, synthetic construct
  source 1..19: mol_type = other RNA
cttctgaatttcctgagaa

SEQ ID NO: 8128 - RNA, 19 nt, synthetic construct
  source 1..19: mol_type = other RNA
tcttctgaatttcctgaga

SEQ ID NO: 8129 - RNA, 19 nt, synthetic construct
  source 1..19: mol_type = other RNA
atcttctgaatttcctgag

SEQ ID NO: 8130 - RNA, 19 nt, synthetic construct
  source 1..19: mol_type = other RNA
catcttctgaatttcctga

SEQ ID NO: 8131 - RNA, 19 nt, synthetic construct
  source 1..19: mol_type = other RNA
acatcttctgaatttcctg

SEQ ID NO: 8132 - RNA, 19 nt, synthetic construct
  source 1..19: mol_type = other RNA
tacatcttctgaatttcct

SEQ ID NO: 8133 - RNA, 19 nt, synthetic construct
  source 1..19: mol_type = other RNA
ctacatcttctgaatttcc

SEQ ID NO: 8134 - RNA, 19 nt, synthetic construct
  source 1..19: mol_type = other RNA
actacatcttctgaatttc

SEQ ID NO: 8135 - RNA, 19 nt, synthetic construct
  source 1..19: mol_type = other RNA
tactacatcttctgaattt

SEQ ID NO: 8136 - RNA, 19 nt, synthetic construct
  source 1..19: mol_type = other RNA
ttactacatcttctgaatt

SEQ ID NO: 8137 - RNA, 19 nt, synthetic construct
  source 1..19: mol_type = other RNA
attactacatcttctgaat

SEQ ID NO: 8138 - RNA, 19 nt, synthetic construct
  source 1..19: mol_type = other RNA
cattactacatcttctgaa

SEQ ID NO: 8139 - RNA, 19 nt, synthetic construct
  source 1..19: mol_type = other RNA
gcattactacatcttctga

SEQ ID NO: 8140 - RNA, 19 nt, synthetic construct
  source 1..19: mol_type = other RNA
tgcattactacatcttctg

SEQ ID NO: 8141 - RNA, 19 nt, synthetic construct
  source 1..19: mol_type = other RNA
atgcattactacatcttct

SEQ ID NO: 8142 - RNA, 19 nt, synthetic construct
  source 1..19: mol_type = other RNA
catgcattactacatcttc

SEQ ID NO: 8143 - RNA, 19 nt, synthetic construct
  source 1..19: mol_type = other RNA
gcatgcattactacatctt

SEQ ID NO: 8144 - RNA, 19 nt, synthetic construct
  source 1..19: mol_type = other RNA
ggcatgcattactacatct

SEQ ID NO: 8145 - RNA, 19 nt, synthetic construct
  source 1..19: mol_type = other RNA
tggcatgcattactacatc

SEQ ID NO: 8146 - RNA, 19 nt, synthetic construct
  source 1..19: mol_type = other RNA
atggcatgcattactacat

SEQ ID NO: 8147 - RNA, 19 nt, synthetic construct
  source 1..19: mol_type = other RNA
tatggcatgcattactaca

SEQ ID NO: 8148 - RNA, 19 nt, synthetic construct
  source 1..19: mol_type = other RNA
gtatggcatgcattactac

SEQ ID NO: 8149 - RNA, 19 nt, synthetic construct
  source 1..19: mol_type = other RNA
tgtatggcatgcattacta

SEQ ID NO: 8150 - RNA, 19 nt, synthetic construct
  source 1..19: mol_type = other RNA
ctgtatggcatgcattact

SEQ ID NO: 8151 - RNA, 19 nt, synthetic construct
  source 1..19: mol_type = other RNA
gctgtatggcatgcattac

SEQ ID NO: 8152 - RNA, 19 nt, synthetic construct
  source 1..19: mol_type = other RNA
agctgtatggcatgcatta

SEQ ID NO: 8153 - RNA, 19 nt, synthetic construct
  source 1..19: mol_type = other RNA
cagctgtatggcatgcatt

SEQ ID NO: 8154 - RNA, 19 nt, synthetic construct
  source 1..19: mol_type = other RNA
gcagctgtatggcatgcat

SEQ ID NO: 8155 - RNA, 19 nt, synthetic construct
  source 1..19: mol_type = other RNA
agcagctgtatggcatgca

SEQ ID NO: 8156 - RNA, 19 nt, synthetic construct
  source 1..19: mol_type = other RNA
cagcagctgtatggcatgc

SEQ ID NO: 8157 - RNA, 19 nt, synthetic construct
  source 1..19: mol_type = other RNA
ccagcagctgtatggcatg

SEQ ID NO: 8158 - RNA, 19 nt, synthetic construct
  source 1..19: mol_type = other RNA
cccagcagctgtatggcat

SEQ ID NO: 8159 - RNA, 19 nt, synthetic construct
  source 1..19: mol_type = other RNA
tcccagcagctgtatggca

SEQ ID NO: 8160 - RNA, 19 nt, synthetic construct
  source 1..19: mol_type = other RNA
ttcccagcagctgtatggc

SEQ ID NO: 8161 - RNA, 19 nt, synthetic construct
  source 1..19: mol_type = other RNA
tttcccagcagctgtatgg

SEQ ID NO: 8162 - RNA, 19 nt, synthetic construct
  source 1..19: mol_type = other RNA
atttcccagcagctgtatg

SEQ ID NO: 8163 - RNA, 19 nt, synthetic construct
  source 1..19: mol_type = other RNA
aatttcccagcagctgtat

SEQ ID NO: 8164 - RNA, 19 nt, synthetic construct
  source 1..19: mol_type = other RNA
caatttcccagcagctgta

SEQ ID NO: 8165 - RNA, 19 nt, synthetic construct
  source 1..19: mol_type = other RNA
acaatttcccagcagctgt

SEQ ID NO: 8166 - RNA, 19 nt, synthetic construct
  source 1..19: mol_type = other RNA
cacaatttcccagcagctg

SEQ ID NO: 8167 - RNA, 19 nt, synthetic construct
  source 1..19: mol_type = other RNA
acacaatttcccagcagct

SEQ ID NO: 8168 - RNA, 19 nt, synthetic construct
  source 1..19: mol_type = other RNA
gacacaatttcccagcagc

SEQ ID NO: 8169 - RNA, 19 nt, synthetic construct
  source 1..19: mol_type = other RNA
tgacacaatttcccagcag

SEQ ID NO: 8170 - RNA, 19 nt, synthetic construct
  source 1..19: mol_type = other RNA
gtgacacaatttcccagca

SEQ ID NO: 8171 - RNA, 19 nt, synthetic construct
  source 1..19: mol_type = other RNA
tgtgacacaatttcccagc

SEQ ID NO: 8172 - RNA, 19 nt, synthetic construct
  source 1..19: mol_type = other RNA
ttgtgacacaatttcccag

SEQ ID NO: 8173 - RNA, 19 nt, synthetic construct
  source 1..19: mol_type = other RNA
attgtgacacaatttccca

SEQ ID NO: 8174 - RNA, 19 nt, synthetic construct
  source 1..19: mol_type = other RNA
gattgtgacacaatttccc

SEQ ID NO: 8175 - RNA, 19 nt, synthetic construct
  source 1..19: mol_type = other RNA
tgattgtgacacaatttcc

SEQ ID NO: 8176 - RNA, 19 nt, synthetic construct
  source 1..19: mol_type = other RNA
gtgattgtgacacaatttc

SEQ ID NO: 8177 - RNA, 19 nt, synthetic construct
  source 1..19: mol_type = other RNA
ggtgattgtgacacaattt

SEQ ID NO: 8178 - RNA, 19 nt, synthetic construct
  source 1..19: mol_type = other RNA
gggtgattgtgacacaatt

SEQ ID NO: 8179 - RNA, 19 nt, synthetic construct
  source 1..19: mol_type = other RNA
tgggtgattgtgacacaat

SEQ ID NO: 8180 - RNA, 19 nt, synthetic construct
  source 1..19: mol_type = other RNA
gtgggtgattgtgacacaa

SEQ ID NO: 8181 - RNA, 19 nt, synthetic construct
  source 1..19: mol_type = other RNA
tgtgggtgattgtgacaca

SEQ ID NO: 8182 - RNA, 19 nt, synthetic construct
  source 1..19: mol_type = other RNA
gtgtgggtgattgtgacac

SEQ ID NO: 8183 - RNA, 19 nt, synthetic construct
  source 1..19: mol_type = other RNA
agtgtgggtgattgtgaca

SEQ ID NO: 8184 - RNA, 19 nt, synthetic construct
  source 1..19: mol_type = other RNA
tagtgtgggtgattgtgac

SEQ ID NO: 8185 - RNA, 19 nt, synthetic construct
  source 1..19: mol_type = other RNA
ctagtgtgggtgattgtga

SEQ ID NO: 8186 - RNA, 19 nt, synthetic construct
  source 1..19: mol_type = other RNA
gctagtgtgggtgattgtg

SEQ ID NO: 8187 - RNA, 19 nt, synthetic construct
  source 1..19: mol_type = other RNA
tgctagtgtgggtgattgt

SEQ ID NO: 8188 - RNA, 19 nt, synthetic construct
  source 1..19: mol_type = other RNA
ctgctagtgtgggtgattg

SEQ ID NO: 8189 - RNA, 19 nt, synthetic construct
  source 1..19: mol_type = other RNA
cctgctagtgtgggtgatt

SEQ ID NO: 8190 - RNA, 19 nt, synthetic construct
  source 1..19: mol_type = other RNA
tcctgctagtgtgggtgat

SEQ ID NO: 8191 - RNA, 19 nt, synthetic construct
  source 1..19: mol_type = other RNA
ttcctgctagtgtgggtga

SEQ ID NO: 8192 - RNA, 19 nt, synthetic construct
  source 1..19: mol_type = other RNA
gttcctgctagtgtgggtg

SEQ ID NO: 8193 - RNA, 19 nt, synthetic construct
  source 1..19: mol_type = other RNA
cgttcctgctagtgtgggt

SEQ ID NO: 8194 - RNA, 19 nt, synthetic construct
  source 1..19: mol_type = other RNA
tcgttcctgctagtgtggg

SEQ ID NO: 8195 - RNA, 19 nt, synthetic construct
  source 1..19: mol_type = other RNA
atcgttcctgctagtgtgg

SEQ ID NO: 8196 - RNA, 19 nt, synthetic construct
  source 1..19: mol_type = other RNA
catcgttcctgctagtgtg

SEQ ID NO: 8197 - RNA, 19 nt, synthetic construct
  source 1..19: mol_type = other RNA
tcatcgttcctgctagtgt

SEQ ID NO: 8198 - RNA, 19 nt, synthetic construct
  source 1..19: mol_type = other RNA
ctcatcgttcctgctagtg

SEQ ID NO: 8199 - RNA, 19 nt, synthetic construct
  source 1..19: mol_type = other RNA
actcatcgttcctgctagt

SEQ ID NO: 8200 - RNA, 19 nt, synthetic construct
  source 1..19: mol_type = other RNA
aactcatcgttcctgctag

SEQ ID NO: 8201 - RNA, 19 nt, synthetic construct
  source 1..19: mol_type = other RNA
aaactcatcgttcctgcta

SEQ ID NO: 8202 - RNA, 19 nt, synthetic construct
  source 1..19: mol_type = other RNA
aaaactcatcgttcctgct

SEQ ID NO: 8203 - RNA, 19 nt, synthetic construct
  source 1..19: mol_type = other RNA
aaaaactcatcgttcctgc

SEQ ID NO: 8204 - RNA, 19 nt, synthetic construct
  source 1..19: mol_type = other RNA
aaaaaactcatcgttcctg

SEQ ID NO: 8205 - RNA, 19 nt, synthetic construct
  source 1..19: mol_type = other RNA
taaaaaactcatcgttcct

SEQ ID NO: 8206 - RNA, 19 nt, synthetic construct
  source 1..19: mol_type = other RNA
ataaaaaactcatcgttcc

SEQ ID NO: 8207 - RNA, 19 nt, synthetic construct
  source 1..19: mol_type = other RNA
gataaaaaactcatcgttc

SEQ ID NO: 8208 - RNA, 19 nt, synthetic construct
  source 1..19: mol_type = other RNA
tgataaaaaactcatcgtt

SEQ ID NO: 8209 - RNA, 19 nt, synthetic construct
  source 1..19: mol_type = other RNA
gtgataaaaaactcatcgt

SEQ ID NO: 8210 - RNA, 19 nt, synthetic construct
  source 1..19: mol_type = other RNA
ggtgataaaaaactcatcg

SEQ ID NO: 8211 - RNA, 19 nt, synthetic construct
  source 1..19: mol_type = other RNA
gggtgataaaaaactcatc

SEQ ID NO: 8212 - RNA, 19 nt, synthetic construct
  source 1..19: mol_type = other RNA
ggggtgataaaaaactcat

SEQ ID NO: 8213 - RNA, 19 nt, synthetic construct
  source 1..19: mol_type = other RNA
gggggtgataaaaaactca

SEQ ID NO: 8214 - RNA, 19 nt, synthetic construct
  source 1..19: mol_type = other RNA
tgggggtgataaaaaactc

SEQ ID NO: 8215 - RNA, 19 nt, synthetic construct
  source 1..19: mol_type = other RNA
ctgggggtgataaaaaact

SEQ ID NO: 8216 - RNA, 19 nt, synthetic construct
  source 1..19: mol_type = other RNA
gctgggggtgataaaaaac

SEQ ID NO: 8217 - RNA, 19 nt, synthetic construct
  source 1..19: mol_type = other RNA
tgctgggggtgataaaaaa

SEQ ID NO: 8218 - RNA, 19 nt, synthetic construct
  source 1..19: mol_type = other RNA
gtgctgggggtgataaaaa

SEQ ID NO: 8219 - RNA, 19 nt, synthetic construct
  source 1..19: mol_type = other RNA
tgtgctgggggtgataaaa

SEQ ID NO: 8220 - RNA, 19 nt, synthetic construct
  source 1..19: mol_type = other RNA
ttgtgctgggggtgataaa

SEQ ID NO: 8221 - RNA, 19 nt, synthetic construct
  source 1..19: mol_type = other RNA
gttgtgctgggggtgataa

SEQ ID NO: 8222 - RNA, 19 nt, synthetic construct
  source 1..19: mol_type = other RNA
agttgtgctgggggtgata

SEQ ID NO: 8223 - RNA, 19 nt, synthetic construct
  source 1..19: mol_type = other RNA
cagttgtgctgggggtgat

SEQ ID NO: 8224 - RNA, 19 nt, synthetic construct
  source 1..19: mol_type = other RNA
acagttgtgctgggggtga

SEQ ID NO: 8225 - RNA, 19 nt, synthetic construct
  source 1..19: mol_type = other RNA
gacagttgtgctgggggtg

SEQ ID NO: 8226 - RNA, 19 nt, synthetic construct
  source 1..19: mol_type = other RNA
ggacagttgtgctgggggt

SEQ ID NO: 8227 - RNA, 19 nt, synthetic construct
  source 1..19: mol_type = other RNA
gggacagttgtgctggggg

SEQ ID NO: 8228 - RNA, 19 nt, synthetic construct
  source 1..19: mol_type = other RNA
tgggacagttgtgctgggg

SEQ ID NO: 8229 - RNA, 19 nt, synthetic construct
  source 1..19: mol_type = other RNA
atgggacagttgtgctggg

SEQ ID NO: 8230 - RNA, 19 nt, synthetic construct
  source 1..19: mol_type = other RNA
gatgggacagttgtgctgg

SEQ ID NO: 8231 - RNA, 19 nt, synthetic construct
  source 1..19: mol_type = other RNA
tgatgggacagttgtgctg

SEQ ID NO: 8232 - RNA, 19 nt, synthetic construct
  source 1..19: mol_type = other RNA
ctgatgggacagttgtgct

SEQ ID NO: 8233 - RNA, 19 nt, synthetic construct
  source 1..19: mol_type = other RNA
actgatgggacagttgtgc

SEQ ID NO: 8234 - RNA, 19 nt, synthetic construct
  source 1..19: mol_type = other RNA
gactgatgggacagttgtg

SEQ ID NO: 8235 - RNA, 19 nt, synthetic construct
  source 1..19: mol_type = other RNA
agactgatgggacagttgt

SEQ ID NO: 8236 - RNA, 19 nt, synthetic construct
  source 1..19: mol_type = other RNA
aagactgatgggacagttg

SEQ ID NO: 8237 - RNA, 19 nt, synthetic construct
  source 1..19: mol_type = other RNA
gaagactgatgggacagtt

SEQ ID NO: 8238 - RNA, 19 nt, synthetic construct
  source 1..19: mol_type = other RNA
cgaagactgatgggacagt

SEQ ID NO: 8239 - RNA, 19 nt, synthetic construct
  source 1..19: mol_type = other RNA
tcgaagactgatgggacag

SEQ ID NO: 8240 - RNA, 19 nt, synthetic construct
  source 1..19: mol_type = other RNA
ttcgaagactgatgggaca

SEQ ID NO: 8241 - RNA, 19 nt, synthetic construct
  source 1..19: mol_type = other RNA
gttcgaagactgatgggac

SEQ ID NO: 8242 - RNA, 19 nt, synthetic construct
  source 1..19: mol_type = other RNA
agttcgaagactgatggga

SEQ ID NO: 8243 - RNA, 19 nt, synthetic construct
  source 1..19: mol_type = other RNA
gagttcgaagactgatggg

SEQ ID NO: 8244 - RNA, 19 nt, synthetic construct
  source 1..19: mol_type = other RNA
tgagttcgaagactgatgg

SEQ ID NO: 8245 - RNA, 19 nt, synthetic construct
  source 1..19: mol_type = other RNA
ttgagttcgaagactgatg

SEQ ID NO: 8246 - RNA, 19 nt, synthetic construct
  source 1..19: mol_type = other RNA
gttgagttcgaagactgat

SEQ ID NO: 8247 - RNA, 19 nt, synthetic construct
  source 1..19: mol_type = other RNA
agttgagttcgaagactga

SEQ ID NO: 8248 - RNA, 19 nt, synthetic construct
  source 1..19: mol_type = other RNA
aagttgagttcgaagactg

SEQ ID NO: 8249 - RNA, 19 nt, synthetic construct
  source 1..19: mol_type = other RNA
gaagttgagttcgaagact

SEQ ID NO: 8250 - RNA, 19 nt, synthetic construct
  source 1..19: mol_type = other RNA
agaagttgagttcgaagac

SEQ ID NO: 8251 - RNA, 19 nt, synthetic construct
  source 1..19: mol_type = other RNA
tagaagttgagttcgaaga

SEQ ID NO: 8252 - RNA, 19 nt, synthetic construct
  source 1..19: mol_type = other RNA
gtagaagttgagttcgaag

SEQ ID NO: 8253 - RNA, 19 nt, synthetic construct
  source 1..19: mol_type = other RNA
tgtagaagttgagttcgaa

SEQ ID NO: 8254 - RNA, 19 nt, synthetic construct
  source 1..19: mol_type = other RNA
ctgtagaagttgagttcga

SEQ ID NO: 8255 - RNA, 19 nt, synthetic construct
  source 1..19: mol_type = other RNA
gctgtagaagttgagttcg

SEQ ID NO: 8256 - RNA, 19 nt, synthetic construct
  source 1..19: mol_type = other RNA
tgctgtagaagttgagttc

SEQ ID NO: 8257 - RNA, 19 nt, synthetic construct
  source 1..19: mol_type = other RNA
ttgctgtagaagttgagtt

SEQ ID NO: 8258 - RNA, 19 nt, synthetic construct
  source 1..19: mol_type = other RNA
attgctgtagaagttgagt

SEQ ID NO: 8259 - RNA, 19 nt, synthetic construct
  source 1..19: mol_type = other RNA
cattgctgtagaagttgag

SEQ ID NO: 8260 - RNA, 19 nt, synthetic construct
  source 1..19: mol_type = other RNA
ccattgctgtagaagttga

SEQ ID NO: 8261 - RNA, 19 nt, synthetic construct
  source 1..19: mol_type = other RNA
cccattgctgtagaagttg

SEQ ID NO: 8262 - RNA, 19 nt, synthetic construct
  source 1..19: mol_type = other RNA
ccccattgctgtagaagtt

SEQ ID NO: 8263 - RNA, 19 nt, synthetic construct
  source 1..19: mol_type = other RNA
accccattgctgtagaagt

SEQ ID NO: 8264 - RNA, 19 nt, synthetic construct
  source 1..19: mol_type = other RNA
taccccattgctgtagaag

SEQ ID NO: 8265 - RNA, 19 nt, synthetic construct
  source 1..19: mol_type = other RNA
gtaccccattgctgtagaa

SEQ ID NO: 8266 - RNA, 19 nt, synthetic construct
  source 1..19: mol_type = other RNA
agtaccccattgctgtaga

SEQ ID NO: 8267 - RNA, 19 nt, synthetic construct
  source 1..19: mol_type = other RNA
aagtaccccattgctgtag

SEQ ID NO: 8268 - RNA, 19 nt, synthetic construct
  source 1..19: mol_type = other RNA
gaagtaccccattgctgta

SEQ ID NO: 8269 - RNA, 19 nt, synthetic construct
  source 1..19: mol_type = other RNA
tgaagtaccccattgctgt

SEQ ID NO: 8270 - RNA, 19 nt, synthetic construct
  source 1..19: mol_type = other RNA
atgaagtaccccattgctg

SEQ ID NO: 8271 - RNA, 19 nt, synthetic construct
  source 1..19: mol_type = other RNA
catgaagtaccccattgct

SEQ ID NO: 8272 - RNA, 19 nt, synthetic construct
  source 1..19: mol_type = other RNA
acatgaagtaccccattgc

SEQ ID NO: 8273 - RNA, 19 nt, synthetic construct
  source 1..19: mol_type = other RNA
gacatgaagtaccccattg

SEQ ID NO: 8274 - RNA, 19 nt, synthetic construct
  source 1..19: mol_type = other RNA
agacatgaagtaccccatt

SEQ ID NO: 8275 - RNA, 19 nt, synthetic construct
  source 1..19: mol_type = other RNA
aagacatgaagtaccccat

SEQ ID NO: 8276 - RNA, 19 nt, synthetic construct
  source 1..19: mol_type = other RNA
aaagacatgaagtacccca

SEQ ID NO: 8277 - RNA, 19 nt, synthetic construct
  source 1..19: mol_type = other RNA
taaagacatgaagtacccc

SEQ ID NO: 8278 - RNA, 19 nt, synthetic construct
  source 1..19: mol_type = other RNA
ataaagacatgaagtaccc

SEQ ID NO: 8279 - RNA, 19 nt, synthetic construct
  source 1..19: mol_type = other RNA
gataaagacatgaagtacc

SEQ ID NO: 8280 - RNA, 19 nt, synthetic construct
  source 1..19: mol_type = other RNA
tgataaagacatgaagtac

SEQ ID NO: 8281 - RNA, 19 nt, synthetic construct
  source 1..19: mol_type = other RNA
atgataaagacatgaagta

SEQ ID NO: 8282 - RNA, 19 nt, synthetic construct
  source 1..19: mol_type = other RNA
catgataaagacatgaagt

SEQ ID NO: 8283 - RNA, 19 nt, synthetic construct
  source 1..19: mol_type = other RNA
ccatgataaagacatgaag

SEQ ID NO: 8284 - RNA, 19 nt, synthetic construct
  source 1..19: mol_type = other RNA
tccatgataaagacatgaa

SEQ ID NO: 8285 - RNA, 19 nt, synthetic construct
  source 1..19: mol_type = other RNA
ctccatgataaagacatga

SEQ ID NO: 8286 - RNA, 19 nt, synthetic construct
  source 1..19: mol_type = other RNA
cctccatgataaagacatg

SEQ ID NO: 8287 - RNA, 19 nt, synthetic construct
  source 1..19: mol_type = other RNA
gcctccatgataaagacat

SEQ ID NO: 8288 - RNA, 19 nt, synthetic construct
  source 1..19: mol_type = other RNA
ggcctccatgataaagaca

SEQ ID NO: 8289 - RNA, 19 nt, synthetic construct
  source 1..19: mol_type = other RNA
tggcctccatgataaagac

SEQ ID NO: 8290 - RNA, 19 nt, synthetic construct
  source 1..19: mol_type = other RNA
atggcctccatgataaaga

SEQ ID NO: 8291 - RNA, 19 nt, synthetic construct
  source 1..19: mol_type = other RNA
gatggcctccatgataaag

SEQ ID NO: 8292 - RNA, 19 nt, synthetic construct
  source 1..19: mol_type = other RNA
tgatggcctccatgataaa

SEQ ID NO: 8293 - RNA, 19 nt, synthetic construct
  source 1..19: mol_type = other RNA
atgatggcctccatgataa

SEQ ID NO: 8294 - RNA, 19 nt, synthetic construct
  source 1..19: mol_type = other RNA
tatgatggcctccatgata

SEQ ID NO: 8295 - RNA, 19 nt, synthetic construct
  source 1..19: mol_type = other RNA
ctatgatggcctccatgat

SEQ ID NO: 8296 - RNA, 19 nt, synthetic construct
  source 1..19: mol_type = other RNA
gctatgatggcctccatga

SEQ ID NO: 8297 - RNA, 19 nt, synthetic construct
  source 1..19: mol_type = other RNA
agctatgatggcctccatg

SEQ ID NO: 8298 - RNA, 19 nt, synthetic construct
  source 1..19: mol_type = other RNA
aagctatgatggcctccat

SEQ ID NO: 8299 - RNA, 19 nt, synthetic construct
  source 1..19: mol_type = other RNA
caagctatgatggcctcca

SEQ ID NO: 8300 - RNA, 19 nt, synthetic construct
  source 1..19: mol_type = other RNA
gcaagctatgatggcctcc

SEQ ID NO: 8301 - RNA, 19 nt, synthetic construct
  source 1..19: mol_type = other RNA
tgcaagctatgatggcctc

SEQ ID NO: 8302 - RNA, 19 nt, synthetic construct
  source 1..19: mol_type = other RNA
ctgcaagctatgatggcct

SEQ ID NO: 8303 - RNA, 19 nt, synthetic construct
  source 1..19: mol_type = other RNA
gctgcaagctatgatggcc

SEQ ID NO: 8304 - RNA, 19 nt, synthetic construct
  source 1..19: mol_type = other RNA
ggctgcaagctatgatggc

SEQ ID NO: 8305 - RNA, 19 nt, synthetic construct
  source 1..19: mol_type = other RNA
aggctgcaagctatgatgg

SEQ ID NO: 8306 - RNA, 19 nt, synthetic construct
  source 1..19: mol_type = other RNA
aaggctgcaagctatgatg

SEQ ID NO: 8307 - RNA, 19 nt, synthetic construct
  source 1..19: mol_type = other RNA
aaaggctgcaagctatgat

SEQ ID NO: 8308 - RNA, 19 nt, synthetic construct
  source 1..19: mol_type = other RNA
taaaggctgcaagctatga

SEQ ID NO: 8309 - RNA, 19 nt, synthetic construct
  source 1..19: mol_type = other RNA
ataaaggctgcaagctatg

SEQ ID NO: 8310 - RNA, 19 nt, synthetic construct
  source 1..19: mol_type = other RNA
cataaaggctgcaagctat

SEQ ID NO: 8311 - RNA, 19 nt, synthetic construct
  source 1..19: mol_type = other RNA
gcataaaggctgcaagcta

SEQ ID NO: 8312 - RNA, 19 nt, synthetic construct
  source 1..19: mol_type = other RNA
tgcataaaggctgcaagct

SEQ ID NO: 8313 - RNA, 19 nt, synthetic construct
  source 1..19: mol_type = other RNA
ctgcataaaggctgcaagc

SEQ ID NO: 8314 - RNA, 19 nt, synthetic construct
  source 1..19: mol_type = other RNA
actgcataaaggctgcaag

SEQ ID NO: 8315 - RNA, 19 nt, synthetic construct
  source 1..19: mol_type = other RNA
aactgcataaaggctgcaa

SEQ ID NO: 8316 - RNA, 19 nt, synthetic construct
  source 1..19: mol_type = other RNA
gaactgcataaaggctgca

SEQ ID NO: 8317 - RNA, 19 nt, synthetic construct
  source 1..19: mol_type = other RNA
agaactgcataaaggctgc

SEQ ID NO: 8318 - RNA, 19 nt, synthetic construct
  source 1..19: mol_type = other RNA
cagaactgcataaaggctg

SEQ ID NO: 8319 - RNA, 19 nt, synthetic construct
  source 1..19: mol_type = other RNA
tcagaactgcataaaggct

SEQ ID NO: 8320 - RNA, 19 nt, synthetic construct
  source 1..19: mol_type = other RNA
ttcagaactgcataaaggc

SEQ ID NO: 8321 - RNA, 19 nt, synthetic construct
  source 1..19: mol_type = other RNA
gttcagaactgcataaagg

SEQ ID NO: 8322 - RNA, 19 nt, synthetic construct
  source 1..19: mol_type = other RNA
tgttcagaactgcataaag

SEQ ID NO: 8323 - RNA, 19 nt, synthetic construct
  source 1..19: mol_type = other RNA
ttgttcagaactgcataaa

SEQ ID NO: 8324 - RNA, 19 nt, synthetic construct
  source 1..19: mol_type = other RNA
cttgttcagaactgcataa

SEQ ID NO: 8325 - RNA, 19 nt, synthetic construct
  source 1..19: mol_type = other RNA
tcttgttcagaactgcata

SEQ ID NO: 8326 - RNA, 19 nt, synthetic construct
  source 1..19: mol_type = other RNA
ctcttgttcagaactgcat

SEQ ID NO: 8327 - RNA, 19 nt, synthetic construct
  source 1..19: mol_type = other RNA
cctcttgttcagaactgca

SEQ ID NO: 8328 - RNA, 19 nt, synthetic construct
  source 1..19: mol_type = other RNA
ccctcttgttcagaactgc

SEQ ID NO: 8329 - RNA, 19 nt, synthetic construct
  source 1..19: mol_type = other RNA
cccctcttgttcagaactg

SEQ ID NO: 8330 - RNA, 19 nt, synthetic construct
  source 1..19: mol_type = other RNA
tcccctcttgttcagaact

SEQ ID NO: 8331 - RNA, 19 nt, synthetic construct
  source 1..19: mol_type = other RNA
gtcccctcttgttcagaac

SEQ ID NO: 8332 - RNA, 19 nt, synthetic construct
  source 1..19: mol_type = other RNA
agtcccctcttgttcagaa

SEQ ID NO: 8333 - RNA, 19 nt, synthetic construct
  source 1..19: mol_type = other RNA
cagtcccctcttgttcaga

SEQ ID NO: 8334 - RNA, 19 nt, synthetic construct
  source 1..19: mol_type = other RNA
ccagtcccctcttgttcag

SEQ ID NO: 8335 - RNA, 19 nt, synthetic construct
  source 1..19: mol_type = other RNA
cccagtcccctcttgttca

SEQ ID NO: 8336 - RNA, 19 nt, synthetic construct
  source 1..19: mol_type = other RNA
ccccagtcccctcttgttc

SEQ ID NO: 8337 - RNA, 19 nt, synthetic construct
  source 1..19: mol_type = other RNA
cccccagtcccctcttgtt

SEQ ID NO: 8338 - RNA, 19 nt, synthetic construct
  source 1..19: mol_type = other RNA
ccccccagtcccctcttgt

SEQ ID NO: 8339 - RNA, 19 nt, synthetic construct
  source 1..19: mol_type = other RNA
accccccagtcccctcttg

SEQ ID NO: 8340 - RNA, 19 nt, synthetic construct
  source 1..19: mol_type = other RNA
gaccccccagtcccctctt

SEQ ID NO: 8341 - RNA, 19 nt, synthetic construct
  source 1..19: mol_type = other RNA
ggaccccccagtcccctct

SEQ ID NO: 8342 - RNA, 19 nt, synthetic construct
  source 1..19: mol_type = other RNA
gggaccccccagtcccctc

SEQ ID NO: 8343 - RNA, 19 nt, synthetic construct
  source 1..19: mol_type = other RNA
tgggaccccccagtcccct

SEQ ID NO: 8344 - RNA, 19 nt, synthetic construct
  source 1..19: mol_type = other RNA
gtgggaccccccagtcccc

SEQ ID NO: 8345 - RNA, 19 nt, synthetic construct
  source 1..19: mol_type = other RNA
agtgggaccccccagtccc

SEQ ID NO: 8346 - RNA, 19 nt, synthetic construct
  source 1..19: mol_type = other RNA
tagtgggaccccccagtcc

SEQ ID NO: 8347 - RNA, 19 nt, synthetic construct
  source 1..19: mol_type = other RNA
ctagtgggaccccccagtc

SEQ ID NO: 8348 - RNA, 19 nt, synthetic construct
  source 1..19: mol_type = other RNA
gctagtgggaccccccagt

SEQ ID NO: 8349 - RNA, 19 nt, synthetic construct
  source 1..19: mol_type = other RNA
tgctagtgggaccccccag

SEQ ID NO: 8350 - RNA, 19 nt, synthetic construct
  source 1..19: mol_type = other RNA
gtgctagtgggacccccca

SEQ ID NO: 8351 - RNA, 19 nt, synthetic construct
  source 1..19: mol_type = other RNA
ggtgctagtgggacccccc

SEQ ID NO: 8352 - RNA, 19 nt, synthetic construct
  source 1..19: mol_type = other RNA
gggtgctagtgggaccccc

SEQ ID NO: 8353 - RNA, 19 nt, synthetic construct
  source 1..19: mol_type = other RNA
ggggtgctagtgggacccc

SEQ ID NO: 8354 - RNA, 19 nt, synthetic construct
  source 1..19: mol_type = other RNA
tggggtgctagtgggaccc

SEQ ID NO: 8355 - RNA, 19 nt, synthetic construct
  source 1..19: mol_type = other RNA
gtggggtgctagtgggacc

SEQ ID NO: 8356 - RNA, 19 nt, synthetic construct
  source 1..19: mol_type = other RNA
ggtggggtgctagtgggac

SEQ ID NO: 8357 - RNA, 19 nt, synthetic construct
  source 1..19: mol_type = other RNA
aggtggggtgctagtggga

SEQ ID NO: 8358 - RNA, 19 nt, synthetic construct
  source 1..19: mol_type = other RNA
taggtggggtgctagtggg

SEQ ID NO: 8359 - RNA, 19 nt, synthetic construct
  source 1..19: mol_type = other RNA
ttaggtggggtgctagtgg

SEQ ID NO: 8360 - RNA, 19 nt, synthetic construct
  source 1..19: mol_type = other RNA
gttaggtggggtgctagtg

SEQ ID NO: 8361 - RNA, 19 nt, synthetic construct
  source 1..19: mol_type = other RNA
ggttaggtggggtgctagt

SEQ ID NO: 8362 - RNA, 19 nt, synthetic construct
  source 1..19: mol_type = other RNA
aggttaggtggggtgctag

SEQ ID NO: 8363 - RNA, 19 nt, synthetic construct
  source 1..19: mol_type = other RNA
caggttaggtggggtgcta

SEQ ID NO: 8364 - RNA, 19 nt, synthetic construct
  source 1..19: mol_type = other RNA
tcaggttaggtggggtgct

SEQ ID NO: 8365 - RNA, 19 nt, synthetic construct
  source 1..19: mol_type = other RNA
atcaggttaggtggggtgc

SEQ ID NO: 8366 - RNA, 19 nt, synthetic construct
  source 1..19: mol_type = other RNA
gatcaggttaggtggggtg

SEQ ID NO: 8367 - RNA, 19 nt, synthetic construct
  source 1..19: mol_type = other RNA
tgatcaggttaggtggggt

SEQ ID NO: 8368 - RNA, 19 nt, synthetic construct
  source 1..19: mol_type = other RNA
ctgatcaggttaggtgggg

SEQ ID NO: 8369 - RNA, 19 nt, synthetic construct
  source 1..19: mol_type = other RNA
gctgatcaggttaggtggg

SEQ ID NO: 8370 - RNA, 19 nt, synthetic construct
  source 1..19: mol_type = other RNA
ggctgatcaggttaggtgg

SEQ ID NO: 8371 - RNA, 19 nt, synthetic construct
  source 1..19: mol_type = other RNA
tggctgatcaggttaggtg

SEQ ID NO: 8372 - RNA, 19 nt, synthetic construct
  source 1..19: mol_type = other RNA
ctggctgatcaggttaggt

SEQ ID NO: 8373 - RNA, 19 nt, synthetic construct
  source 1..19: mol_type = other RNA
cctggctgatcaggttagg

SEQ ID NO: 8374 - RNA, 19 nt, synthetic construct
  source 1..19: mol_type = other RNA
tcctggctgatcaggttag

SEQ ID NO: 8375 - RNA, 19 nt, synthetic construct
  source 1..19: mol_type = other RNA
ctcctggctgatcaggtta

SEQ ID NO: 8376 - RNA, 19 nt, synthetic construct
  source 1..19: mol_type = other RNA
gctcctggctgatcaggtt

SEQ ID NO: 8377 - RNA, 19 nt, synthetic construct
  source 1..19: mol_type = other RNA
tgctcctggctgatcaggt

SEQ ID NO: 8378 - RNA, 19 nt, synthetic construct
  source 1..19: mol_type = other RNA
ctgctcctggctgatcagg

SEQ ID NO: 8379 - RNA, 19 nt, synthetic construct
  source 1..19: mol_type = other RNA
gctgctcctggctgatcag

SEQ ID NO: 8380 - RNA, 19 nt, synthetic construct
  source 1..19: mol_type = other RNA
agctgctcctggctgatca

SEQ ID NO: 8381 - RNA, 19 nt, synthetic construct
  source 1..19: mol_type = other RNA
cagctgctcctggctgatc

SEQ ID NO: 8382 - RNA, 19 nt, synthetic construct
  source 1..19: mol_type = other RNA
ccagctgctcctggctgat

SEQ ID NO: 8383 - RNA, 19 nt, synthetic construct
  source 1..19: mol_type = other RNA
accagctgctcctggctga

SEQ ID NO: 8384 - RNA, 19 nt, synthetic construct
  source 1..19: mol_type = other RNA
caccagctgctcctggctg

SEQ ID NO: 8385 - RNA, 19 nt, synthetic construct
  source 1..19: mol_type = other RNA
gcaccagctgctcctggct

SEQ ID NO: 8386 - RNA, 19 nt, synthetic construct
  source 1..19: mol_type = other RNA
cgcaccagctgctcctggc

SEQ ID NO: 8387 - RNA, 19 nt, synthetic construct
  source 1..19: mol_type = other RNA
ccgcaccagctgctcctgg

SEQ ID NO: 8388 - RNA, 19 nt, synthetic construct
  source 1..19: mol_type = other RNA
tccgcaccagctgctcctg

SEQ ID NO: 8389 - RNA, 19 nt, synthetic construct
  source 1..19: mol_type = other RNA
ttccgcaccagctgctcct

SEQ ID NO: 8390 - RNA, 19 nt, synthetic construct
  source 1..19: mol_type = other RNA
cttccgcaccagctgctcc

SEQ ID NO: 8391 - RNA, 19 nt, synthetic construct
  source 1..19: mol_type = other RNA
ccttccgcaccagctgctc

SEQ ID NO: 8392 - RNA, 19 nt, synthetic construct
  source 1..19: mol_type = other RNA
gccttccgcaccagctgct

SEQ ID NO: 8393 - RNA, 19 nt, synthetic construct
  source 1..19: mol_type = other RNA
cgccttccgcaccagctgc

SEQ ID NO: 8394 - RNA, 19 nt, synthetic construct
  source 1..19: mol_type = other RNA
ccgccttccgcaccagctg

SEQ ID NO: 8395 - RNA, 19 nt, synthetic construct
  source 1..19: mol_type = other RNA
gccgccttccgcaccagct

SEQ ID NO: 8396 - RNA, 19 nt, synthetic construct
  source 1..19: mol_type = other RNA
ggccgccttccgcaccagc

SEQ ID NO: 8397 - RNA, 19 nt, synthetic construct
  source 1..19: mol_type = other RNA
tggccgccttccgcaccag

SEQ ID NO: 8398 - RNA, 19 nt, synthetic construct
  source 1..19: mol_type = other RNA
ctggccgccttccgcacca

SEQ ID NO: 8399 - RNA, 19 nt, synthetic construct
  source 1..19: mol_type = other RNA
gctggccgccttccgcacc

SEQ ID NO: 8400 - RNA, 19 nt, synthetic construct
  source 1..19: mol_type = other RNA
ggctggccgccttccgcac

SEQ ID NO: 8401 - RNA, 19 nt, synthetic construct
  source 1..19: mol_type = other RNA
aggctggccgccttccgca

SEQ ID NO: 8402 - RNA, 19 nt, synthetic construct
  source 1..19: mol_type = other RNA
caggctggccgccttccgc

SEQ ID NO: 8403 - RNA, 19 nt, synthetic construct
  source 1..19: mol_type = other RNA
acaggctggccgccttccg

SEQ ID NO: 8404 - RNA, 19 nt, synthetic construct
  source 1..19: mol_type = other RNA
cacaggctggccgccttcc

SEQ ID NO: 8405 - RNA, 19 nt, synthetic construct
  source 1..19: mol_type = other RNA
gcacaggctggccgccttc

SEQ ID NO: 8406 - RNA, 19 nt, synthetic construct
  source 1..19: mol_type = other RNA
agcacaggctggccgcctt

SEQ ID NO: 8407 - RNA, 19 nt, synthetic construct
  source 1..19: mol_type = other RNA
tagcacaggctggccgcct

SEQ ID NO: 8408 - RNA, 19 nt, synthetic construct
  source 1..19: mol_type = other RNA
gtagcacaggctggccgcc

SEQ ID NO: 8409 - RNA, 19 nt, synthetic construct
  source 1..19: mol_type = other RNA
ggtagcacaggctggccgc

SEQ ID NO: 8410 - RNA, 19 nt, synthetic construct
  source 1..19: mol_type = other RNA
aggtagcacaggctggccg

SEQ ID NO: 8411 - RNA, 19 nt, synthetic construct
  source 1..19: mol_type = other RNA
aaggtagcacaggctggcc

SEQ ID NO: 8412 - RNA, 19 nt, synthetic construct
  source 1..19: mol_type = other RNA
gaaggtagcacaggctggc

SEQ ID NO: 8413 - RNA, 19 nt, synthetic construct
  source 1..19: mol_type = other RNA
agaaggtagcacaggctgg

SEQ ID NO: 8414 - RNA, 19 nt, synthetic construct
  source 1..19: mol_type = other RNA
gagaaggtagcacaggctg

SEQ ID NO: 8415 - RNA, 19 nt, synthetic construct
  source 1..19: mol_type = other RNA
agagaaggtagcacaggct

SEQ ID NO: 8416 - RNA, 19 nt, synthetic construct
  source 1..19: mol_type = other RNA
gagagaaggtagcacaggc

SEQ ID NO: 8417 - RNA, 19 nt, synthetic construct
  source 1..19: mol_type = other RNA
ggagagaaggtagcacagg

SEQ ID NO: 8418 - RNA, 19 nt, synthetic construct
  source 1..19: mol_type = other RNA
tggagagaaggtagcacag

SEQ ID NO: 8419 - RNA, 19 nt, synthetic construct
  source 1..19: mol_type = other RNA
ttggagagaaggtagcaca

SEQ ID NO: 8420 - RNA, 19 nt, synthetic construct
  source 1..19: mol_type = other RNA
attggagagaaggtagcac

SEQ ID NO: 8421 - RNA, 19 nt, synthetic construct
  source 1..19: mol_type = other RNA
cattggagagaaggtagca

SEQ ID NO: 8422 - RNA, 19 nt, synthetic construct
  source 1..19: mol_type = other RNA
tcattggagagaaggtagc

SEQ ID NO: 8423 - RNA, 19 nt, synthetic construct
  source 1..19: mol_type = other RNA
ttcattggagagaaggtag

SEQ ID NO: 8424 - RNA, 19 nt, synthetic construct
  source 1..19: mol_type = other RNA
cttcattggagagaaggta

SEQ ID NO: 8425 - RNA, 19 nt, synthetic construct
  source 1..19: mol_type = other RNA
ccttcattggagagaaggt

SEQ ID NO: 8426 - RNA, 19 nt, synthetic construct
  source 1..19: mol_type = other RNA
gccttcattggagagaagg

SEQ ID NO: 8427 - RNA, 19 nt, synthetic construct
  source 1..19: mol_type = other RNA
tgccttcattggagagaag

SEQ ID NO: 8428 - RNA, 19 nt, synthetic construct
  source 1..19: mol_type = other RNA
gtgccttcattggagagaa

SEQ ID NO: 8429 - RNA, 19 nt, synthetic construct
  source 1..19: mol_type = other RNA
ggtgccttcattggagaga

SEQ ID NO: 8430 - RNA, 19 nt, synthetic construct
  source 1..19: mol_type = other RNA
tggtgccttcattggagag

SEQ ID NO: 8431 - RNA, 19 nt, synthetic construct
  source 1..19: mol_type = other RNA
atggtgccttcattggaga

SEQ ID NO: 8432 - RNA, 19 nt, synthetic construct
  source 1..19: mol_type = other RNA
gatggtgccttcattggag

SEQ ID NO: 8433 - RNA, 19 nt, synthetic construct
  source 1..19: mol_type = other RNA
agatggtgccttcattgga

SEQ ID NO: 8434 - RNA, 19 nt, synthetic construct
  source 1..19: mol_type = other RNA
gagatggtgccttcattgg

SEQ ID NO: 8435 - RNA, 19 nt, synthetic construct
  source 1..19: mol_type = other RNA
tgagatggtgccttcattg

SEQ ID NO: 8436 - RNA, 19 nt, synthetic construct
  source 1..19: mol_type = other RNA
gtgagatggtgccttcatt

SEQ ID NO: 8437 - RNA, 19 nt, synthetic construct
  source 1..19: mol_type = other RNA
agtgagatggtgccttcat

SEQ ID NO: 8438 - RNA, 19 nt, synthetic construct
  source 1..19: mol_type = other RNA
cagtgagatggtgccttca

SEQ ID NO: 8439 - RNA, 19 nt, synthetic construct
  source 1..19: mol_type = other RNA
gcagtgagatggtgccttc

SEQ ID NO: 8440 - RNA, 19 nt, synthetic construct
  source 1..19: mol_type = other RNA
ggcagtgagatggtgcctt

SEQ ID NO: 8441 - RNA, 19 nt, synthetic construct
  source 1..19: mol_type = other RNA
aggcagtgagatggtgcct

SEQ ID NO: 8442 - RNA, 19 nt, synthetic construct
  source 1..19: mol_type = other RNA
aaggcagtgagatggtgcc

SEQ ID NO: 8443 - RNA, 19 nt, synthetic construct
  source 1..19: mol_type = other RNA
caaggcagtgagatggtgc

SEQ ID NO: 8444 - RNA, 19 nt, synthetic construct
  source 1..19: mol_type = other RNA
gcaaggcagtgagatggtg

SEQ ID NO: 8445 - RNA, 19 nt, synthetic construct
  source 1..19: mol_type = other RNA
ggcaaggcagtgagatggt

SEQ ID NO: 8446 - RNA, 19 nt, synthetic construct
  source 1..19: mol_type = other RNA
tggcaaggcagtgagatgg

SEQ ID NO: 8447 - RNA, 19 nt, synthetic construct
  source 1..19: mol_type = other RNA
ctggcaaggcagtgagatg

SEQ ID NO: 8448 - RNA, 19 nt, synthetic construct
  source 1..19: mol_type = other RNA
tctggcaaggcagtgagat

SEQ ID NO: 8449 - RNA, 19 nt, synthetic construct
  source 1..19: mol_type = other RNA
gtctggcaaggcagtgaga

SEQ ID NO: 8450 - RNA, 19 nt, synthetic construct
  source 1..19: mol_type = other RNA
tgtctggcaaggcagtgag

SEQ ID NO: 8451 - RNA, 19 nt, synthetic construct
  source 1..19: mol_type = other RNA
atgtctggcaaggcagtga

SEQ ID NO: 8452 - RNA, 19 nt, synthetic construct
  source 1..19: mol_type = other RNA
aatgtctggcaaggcagtg

SEQ ID NO: 8453 - RNA, 19 nt, synthetic construct
  source 1..19: mol_type = other RNA
aaatgtctggcaaggcagt

SEQ ID NO: 8454 - RNA, 19 nt, synthetic construct
  source 1..19: mol_type = other RNA
aaaatgtctggcaaggcag

SEQ ID NO: 8455 - RNA, 19 nt, synthetic construct
  source 1..19: mol_type = other RNA
taaaatgtctggcaaggca

SEQ ID NO: 8456 - RNA, 19 nt, synthetic construct
  source 1..19: mol_type = other RNA
gtaaaatgtctggcaaggc

SEQ ID NO: 8457 - RNA, 19 nt, synthetic construct
  source 1..19: mol_type = other RNA
ggtaaaatgtctggcaagg

SEQ ID NO: 8458 - RNA, 19 nt, synthetic construct
  source 1..19: mol_type = other RNA
tggtaaaatgtctggcaag

SEQ ID NO: 8459 - RNA, 19 nt, synthetic construct
  source 1..19: mol_type = other RNA
ttggtaaaatgtctggcaa

SEQ ID NO: 8460 - RNA, 19 nt, synthetic construct
  source 1..19: mol_type = other RNA
cttggtaaaatgtctggca

SEQ ID NO: 8461 - RNA, 19 nt, synthetic construct
  source 1..19: mol_type = other RNA
acttggtaaaatgtctggc

SEQ ID NO: 8462 - RNA, 19 nt, synthetic construct
  source 1..19: mol_type = other RNA
gacttggtaaaatgtctgg

SEQ ID NO: 8463 - RNA, 19 nt, synthetic construct
  source 1..19: mol_type = other RNA
agacttggtaaaatgtctg

SEQ ID NO: 8464 - RNA, 19 nt, synthetic construct
  source 1..19: mol_type = other RNA
cagacttggtaaaatgtct

SEQ ID NO: 8465 - RNA, 19 nt, synthetic construct
  source 1..19: mol_type = other RNA
gcagacttggtaaaatgtc

SEQ ID NO: 8466 - RNA, 19 nt, synthetic construct
  source 1..19: mol_type = other RNA
ggcagacttggtaaaatgt

SEQ ID NO: 8467 - RNA, 19 nt, synthetic construct
  source 1..19: mol_type = other RNA
tggcagacttggtaaaatg

SEQ ID NO: 8468 - RNA, 19 nt, synthetic construct
  source 1..19: mol_type = other RNA
atggcagacttggtaaaat

SEQ ID NO: 8469 - RNA, 19 nt, synthetic construct
  source 1..19: mol_type = other RNA
catggcagacttggtaaaa

SEQ ID NO: 8470 - RNA, 19 nt, synthetic construct
  source 1..19: mol_type = other RNA
tcatggcagacttggtaaa

SEQ ID NO: 8471 - RNA, 19 nt, synthetic construct
  source 1..19: mol_type = other RNA
ttcatggcagacttggtaa

SEQ ID NO: 8472 - RNA, 19 nt, synthetic construct
  source 1..19: mol_type = other RNA
tttcatggcagacttggta

SEQ ID NO: 8473 - RNA, 19 nt, synthetic construct
  source 1..19: mol_type = other RNA
gtttcatggcagacttggt

SEQ ID NO: 8474 - RNA, 19 nt, synthetic construct
  source 1..19: mol_type = other RNA
tgtttcatggcagacttgg

SEQ ID NO: 8475 - RNA, 19 nt, synthetic construct
  source 1..19: mol_type = other RNA
ctgtttcatggcagacttg

SEQ ID NO: 8476 - RNA, 19 nt, synthetic construct
  source 1..19: mol_type = other RNA
actgtttcatggcagactt

SEQ ID NO: 8477 - RNA, 19 nt, synthetic construct
  source 1..19: mol_type = other RNA
tactgtttcatggcagact

SEQ ID NO: 8478 - RNA, 19 nt, synthetic construct
  source 1..19: mol_type = other RNA
ctactgtttcatggcagac

SEQ ID NO: 8479 - RNA, 19 nt, synthetic construct
  source 1..19: mol_type = other RNA
cctactgtttcatggcaga

SEQ ID NO: 8480 - RNA, 19 nt, synthetic construct
  source 1..19: mol_type = other RNA
tcctactgtttcatggcag

SEQ ID NO: 8481 - RNA, 19 nt, synthetic construct
  source 1..19: mol_type = other RNA
ttcctactgtttcatggca

SEQ ID NO: 8482 - RNA, 19 nt, synthetic construct
  source 1..19: mol_type = other RNA
tttcctactgtttcatggc

SEQ ID NO: 8483 - RNA, 19 nt, synthetic construct
  source 1..19: mol_type = other RNA
ctttcctactgtttcatgg

SEQ ID NO: 8484 - RNA, 19 nt, synthetic construct
  source 1..19: mol_type = other RNA
actttcctactgtttcatg

SEQ ID NO: 8485 - RNA, 19 nt, synthetic construct
  source 1..19: mol_type = other RNA
aactttcctactgtttcat

SEQ ID NO: 8486 - RNA, 19 nt, synthetic construct
  source 1..19: mol_type = other RNA
aaactttcctactgtttca

SEQ ID NO: 8487 - RNA, 19 nt, synthetic construct
  source 1..19: mol_type = other RNA
taaactttcctactgtttc

SEQ ID NO: 8488 - RNA, 19 nt, synthetic construct
  source 1..19: mol_type = other RNA
ataaactttcctactgttt

SEQ ID NO: 8489 - RNA, 19 nt, synthetic construct
  source 1..19: mol_type = other RNA
gataaactttcctactgtt

SEQ ID NO: 8490 - RNA, 19 nt, synthetic construct
  source 1..19: mol_type = other RNA
ggataaactttcctactgt

SEQ ID NO: 8491 - RNA, 19 nt, synthetic construct
  source 1..19: mol_type = other RNA
tggataaactttcctactg

SEQ ID NO: 8492 - RNA, 19 nt, synthetic construct
  source 1..19: mol_type = other RNA
ctggataaactttcctact

SEQ ID NO: 8493 - RNA, 19 nt, synthetic construct
  source 1..19: mol_type = other RNA
actggataaactttcctac

SEQ ID NO: 8494 - RNA, 19 nt, synthetic construct
  source 1..19: mol_type = other RNA
tactggataaactttccta

SEQ ID NO: 8495 - RNA, 19 nt, synthetic construct
  source 1..19: mol_type = other RNA
atactggataaactttcct

SEQ ID NO: 8496 - RNA, 19 nt, synthetic construct
  source 1..19: mol_type = other RNA
catactggataaactttcc

SEQ ID NO: 8497 - RNA, 19 nt, synthetic construct
  source 1..19: mol_type = other RNA
ccatactggataaactttc

SEQ ID NO: 8498 - RNA, 19 nt, synthetic construct
  source 1..19: mol_type = other RNA
gccatactggataaacttt

SEQ ID NO: 8499 - RNA, 19 nt, synthetic construct
  source 1..19: mol_type = other RNA
tgccatactggataaactt

SEQ ID NO: 8500 - RNA, 19 nt, synthetic construct
  source 1..19: mol_type = other RNA
atgccatactggataaact

SEQ ID NO: 8501 - RNA, 19 nt, synthetic construct
  source 1..19: mol_type = other RNA
aatgccatactggataaac

SEQ ID NO: 8502 - RNA, 19 nt, synthetic construct
  source 1..19: mol_type = other RNA
gaatgccatactggataaa

SEQ ID NO: 8503 - RNA, 19 nt, synthetic construct
  source 1..19: mol_type = other RNA
agaatgccatactggataa

SEQ ID NO: 8504 - RNA, 19 nt, synthetic construct
  source 1..19: mol_type = other RNA
aagaatgccatactggata

SEQ ID NO: 8505 - RNA, 19 nt, synthetic construct
  source 1..19: mol_type = other RNA
taagaatgccatactggat

SEQ ID NO: 8506 - RNA, 19 nt, synthetic construct
  source 1..19: mol_type = other RNA
gtaagaatgccatactgga

SEQ ID NO: 8507 - RNA, 19 nt, synthetic construct
  source 1..19: mol_type = other RNA
tgtaagaatgccatactgg

SEQ ID NO: 8508 - RNA, 19 nt, synthetic construct
  source 1..19: mol_type = other RNA
ctgtaagaatgccatactg

SEQ ID NO: 8509 - RNA, 19 nt, synthetic construct
  source 1..19: mol_type = other RNA
actgtaagaatgccatact

SEQ ID NO: 8510 - RNA, 19 nt, synthetic construct
  source 1..19: mol_type = other RNA
cactgtaagaatgccatac

SEQ ID NO: 8511 - RNA, 19 nt, synthetic construct
  source 1..19: mol_type = other RNA
ccactgtaagaatgccata

SEQ ID NO: 8512 - RNA, 19 nt, synthetic construct
  source 1..19: mol_type = other RNA
gccactgtaagaatgccat

SEQ ID NO: 8513 - RNA, 19 nt, synthetic construct
  source 1..19: mol_type = other RNA
tgccactgtaagaatgcca

SEQ ID NO: 8514 - RNA, 19 nt, synthetic construct
  source 1..19: mol_type = other RNA
ctgccactgtaagaatgcc

SEQ ID NO: 8515 - RNA, 19 nt, synthetic construct
  source 1..19: mol_type = other RNA
tctgccactgtaagaatgc

SEQ ID NO: 8516 - RNA, 19 nt, synthetic construct
  source 1..19: mol_type = other RNA
ctctgccactgtaagaatg

SEQ ID NO: 8517 - RNA, 19 nt, synthetic construct
  source 1..19: mol_type = other RNA
gctctgccactgtaagaat

SEQ ID NO: 8518 - RNA, 19 nt, synthetic construct
  source 1..19: mol_type = other RNA
tgctctgccactgtaagaa

SEQ ID NO: 8519 - RNA, 19 nt, synthetic construct
  source 1..19: mol_type = other RNA
gtgctctgccactgtaaga

SEQ ID NO: 8520 - RNA, 19 nt, synthetic construct
  source 1..19: mol_type = other RNA
cgtgctctgccactgtaag

SEQ ID NO: 8521 - RNA, 19 nt, synthetic construct
  source 1..19: mol_type = other RNA
tcgtgctctgccactgtaa

SEQ ID NO: 8522 - RNA, 19 nt, synthetic construct
  source 1..19: mol_type = other RNA
atcgtgctctgccactgta

SEQ ID NO: 8523 - RNA, 19 nt, synthetic construct
  source 1..19: mol_type = other RNA
catcgtgctctgccactgt

SEQ ID NO: 8524 - RNA, 19 nt, synthetic construct
  source 1..19: mol_type = other RNA
tcatcgtgctctgccactg

SEQ ID NO: 8525 - RNA, 19 nt, synthetic construct
  source 1..19: mol_type = other RNA
gtcatcgtgctctgccact

SEQ ID NO: 8526 - RNA, 19 nt, synthetic construct
  source 1..19: mol_type = other RNA
ggtcatcgtgctctgccac

SEQ ID NO: 8527 - RNA, 19 nt, synthetic construct
  source 1..19: mol_type = other RNA
tggtcatcgtgctctgcca

SEQ ID NO: 8528 - RNA, 19 nt, synthetic construct
  source 1..19: mol_type = other RNA
ctggtcatcgtgctctgcc

SEQ ID NO: 8529 - RNA, 19 nt, synthetic construct
  source 1..19: mol_type = other RNA
cctggtcatcgtgctctgc

SEQ ID NO: 8530 - RNA, 19 nt, synthetic construct
  source 1..19: mol_type = other RNA
tcctggtcatcgtgctctg

SEQ ID NO: 8531 - RNA, 19 nt, synthetic construct
  source 1..19: mol_type = other RNA
ttcctggtcatcgtgctct

SEQ ID NO: 8532 - RNA, 19 nt, synthetic construct
  source 1..19: mol_type = other RNA
cttcctggtcatcgtgctc

SEQ ID NO: 8533 - RNA, 19 nt, synthetic construct
  source 1..19: mol_type = other RNA
tcttcctggtcatcgtgct

SEQ ID NO: 8534 - RNA, 19 nt, synthetic construct
  source 1..19: mol_type = other RNA
atcttcctggtcatcgtgc

SEQ ID NO: 8535 - RNA, 19 nt, synthetic construct
  source 1..19: mol_type = other RNA
tatcttcctggtcatcgtg

SEQ ID NO: 8536 - RNA, 19 nt, synthetic construct
  source 1..19: mol_type = other RNA
atatcttcctggtcatcgt

SEQ ID NO: 8537 - RNA, 19 nt, synthetic construct
  source 1..19: mol_type = other RNA
gatatcttcctggtcatcg

SEQ ID NO: 8538 - RNA, 19 nt, synthetic construct
  source 1..19: mol_type = other RNA
tgatatcttcctggtcatc

SEQ ID NO: 8539 - RNA, 19 nt, synthetic construct
  source 1..19: mol_type = other RNA
ctgatatcttcctggtcat

SEQ ID NO: 8540 - RNA, 19 nt, synthetic construct
  source 1..19: mol_type = other RNA
actgatatcttcctggtca

SEQ ID NO: 8541 - RNA, 19 nt, synthetic construct
  source 1..19: mol_type = other RNA
gactgatatcttcctggtc

SEQ ID NO: 8542 - RNA, 19 nt, synthetic construct
  source 1..19: mol_type = other RNA
ggactgatatcttcctggt

SEQ ID NO: 8543 - RNA, 19 nt, synthetic construct
  source 1..19: mol_type = other RNA
aggactgatatcttcctgg

SEQ ID NO: 8544 - RNA, 19 nt, synthetic construct
  source 1..19: mol_type = other RNA
taggactgatatcttcctg

SEQ ID NO: 8545 - RNA, 19 nt, synthetic construct
  source 1..19: mol_type = other RNA
ctaggactgatatcttcct

SEQ ID NO: 8546 - RNA, 19 nt, synthetic construct
  source 1..19: mol_type = other RNA
actaggactgatatcttcc

SEQ ID NO: 8547 - RNA, 19 nt, synthetic construct
  source 1..19: mol_type = other RNA
gactaggactgatatcttc

SEQ ID NO: 8548 - RNA, 19 nt, synthetic construct
  source 1..19: mol_type = other RNA
agactaggactgatatctt

SEQ ID NO: 8549 - RNA, 19 nt, synthetic construct
  source 1..19: mol_type = other RNA
aagactaggactgatatct

SEQ ID NO: 8550 - RNA, 19 nt, synthetic construct
  source 1..19: mol_type = other RNA
caagactaggactgatatc

SEQ ID NO: 8551 - RNA, 19 nt, synthetic construct
  source 1..19: mol_type = other RNA
gcaagactaggactgatat

SEQ ID NO: 8552 - RNA, 19 nt, synthetic construct
  source 1..19: mol_type = other RNA
agcaagactaggactgata

SEQ ID NO: 8553 - RNA, 19 nt, synthetic construct
  source 1..19: mol_type = other RNA
cagcaagactaggactgat

SEQ ID NO: 8554 - RNA, 19 nt, synthetic construct
  source 1..19: mol_type = other RNA
tcagcaagactaggactga

SEQ ID NO: 8555 - RNA, 19 nt, synthetic construct
  source 1..19: mol_type = other RNA
ctcagcaagactaggactg

SEQ ID NO: 8556 - RNA, 19 nt, synthetic construct
  source 1..19: mol_type = other RNA
gctcagcaagactaggact

SEQ ID NO: 8557 - RNA, 19 nt, synthetic construct
  source 1..19: mol_type = other RNA
tgctcagcaagactaggac

SEQ ID NO: 8558 - RNA, 19 nt, synthetic construct
  source 1..19: mol_type = other RNA
ctgctcagcaagactagga

SEQ ID NO: 8559 - RNA, 19 nt, synthetic construct
  source 1..19: mol_type = other RNA
gctgctcagcaagactagg

SEQ ID NO: 8560 - RNA, 19 nt, synthetic construct
  source 1..19: mol_type = other RNA
tgctgctcagcaagactag

SEQ ID NO: 8561 - RNA, 19 nt, synthetic construct
  source 1..19: mol_type = other RNA
ctgctgctcagcaagacta

SEQ ID NO: 8562 - RNA, 19 nt, synthetic construct
  source 1..19: mol_type = other RNA
actgctgctcagcaagact

SEQ ID NO: 8563 - RNA, 19 nt, synthetic construct
  source 1..19: mol_type = other RNA
cactgctgctcagcaagac

SEQ ID NO: 8564 - RNA, 19 nt, synthetic construct
  source 1..19: mol_type = other RNA
ccactgctgctcagcaaga

SEQ ID NO: 8565 - RNA, 19 nt, synthetic construct
  source 1..19: mol_type = other RNA
cccactgctgctcagcaag

SEQ ID NO: 8566 - RNA, 19 nt, synthetic construct
  source 1..19: mol_type = other RNA
tcccactgctgctcagcaa

SEQ ID NO: 8567 - RNA, 19 nt, synthetic construct
  source 1..19: mol_type = other RNA
gtcccactgctgctcagca

SEQ ID NO: 8568 - RNA, 19 nt, synthetic construct
  source 1..19: mol_type = other RNA
tgtcccactgctgctcagc

SEQ ID NO: 8569 - RNA, 19 nt, synthetic construct
  source 1..19: mol_type = other RNA
ttgtcccactgctgctcag

SEQ ID NO: 8570 - RNA, 19 nt, synthetic construct
  source 1..19: mol_type = other RNA
cttgtcccactgctgctca

SEQ ID NO: 8571 - RNA, 19 nt, synthetic construct
  source 1..19: mol_type = other RNA
tcttgtcccactgctgctc

SEQ ID NO: 8572 - RNA, 19 nt, synthetic construct
  source 1..19: mol_type = other RNA
ttcttgtcccactgctgct

SEQ ID NO: 8573 - RNA, 19 nt, synthetic construct
  source 1..19: mol_type = other RNA
cttcttgtcccactgctgc

SEQ ID NO: 8574 - RNA, 19 nt, synthetic construct
  source 1..19: mol_type = other RNA
gcttcttgtcccactgctg

SEQ ID NO: 8575 - RNA, 19 nt, synthetic construct
  source 1..19: mol_type = other RNA
agcttcttgtcccactgct

SEQ ID NO: 8576 - RNA, 19 nt, synthetic construct
  source 1..19: mol_type = other RNA
aagcttcttgtcccactgc

SEQ ID NO: 8577 - RNA, 19 nt, synthetic construct
  source 1..19: mol_type = other RNA
gaagcttcttgtcccactg

SEQ ID NO: 8578 - RNA, 19 nt, synthetic construct
  source 1..19: mol_type = other RNA
ggaagcttcttgtcccact

SEQ ID NO: 8579 - RNA, 19 nt, synthetic construct
  source 1..19: mol_type = other RNA
tggaagcttcttgtcccac

SEQ ID NO: 8580 - RNA, 19 nt, synthetic construct
  source 1..19: mol_type = other RNA
ctggaagcttcttgtccca

SEQ ID NO: 8581 - RNA, 19 nt, synthetic construct
  source 1..19: mol_type = other RNA
tctggaagcttcttgtccc

SEQ ID NO: 8582 - RNA, 19 nt, synthetic construct
  source 1..19: mol_type = other RNA
ttctggaagcttcttgtcc

SEQ ID NO: 8583 - RNA, 19 nt, synthetic construct
  source 1..19: mol_type = other RNA
gttctggaagcttcttgtc

SEQ ID NO: 8584 - RNA, 19 nt, synthetic construct
  source 1..19: mol_type = other RNA
ggttctggaagcttcttgt

SEQ ID NO: 8585 - RNA, 19 nt, synthetic construct
  source 1..19: mol_type = other RNA
aggttctggaagcttcttg

SEQ ID NO: 8586 - RNA, 19 nt, synthetic construct
  source 1..19: mol_type = other RNA
aaggttctggaagcttctt

SEQ ID NO: 8587 - RNA, 19 nt, synthetic construct
  source 1..19: mol_type = other RNA
aaaggttctggaagcttct

SEQ ID NO: 8588 - RNA, 19 nt, synthetic construct
  source 1..19: mol_type = other RNA
caaaggttctggaagcttc

SEQ ID NO: 8589 - RNA, 19 nt, synthetic construct
  source 1..19: mol_type = other RNA
acaaaggttctggaagctt

SEQ ID NO: 8590 - RNA, 19 nt, synthetic construct
  source 1..19: mol_type = other RNA
gacaaaggttctggaagct

SEQ ID NO: 8591 - RNA, 19 nt, synthetic construct
  source 1..19: mol_type = other RNA
agacaaaggttctggaagc

SEQ ID NO: 8592 - RNA, 19 nt, synthetic construct
  source 1..19: mol_type = other RNA
aagacaaaggttctggaag

SEQ ID NO: 8593 - RNA, 19 nt, synthetic construct
  source 1..19: mol_type = other RNA
caagacaaaggttctggaa

SEQ ID NO: 8594 - RNA, 19 nt, synthetic construct
  source 1..19: mol_type = other RNA
ccaagacaaaggttctgga

SEQ ID NO: 8595 - RNA, 19 nt, synthetic construct
  source 1..19: mol_type = other RNA
tccaagacaaaggttctgg

SEQ ID NO: 8596 - RNA, 19 nt, synthetic construct
  source 1..19: mol_type = other RNA
ctccaagacaaaggttctg

SEQ ID NO: 8597 - RNA, 19 nt, synthetic construct
  source 1..19: mol_type = other RNA
tctccaagacaaaggttct

SEQ ID NO: 8598 - RNA, 19 nt, synthetic construct
  source 1..19: mol_type = other RNA
ttctccaagacaaaggttc

SEQ ID NO: 8599 - RNA, 19 nt, synthetic construct
  source 1..19: mol_type = other RNA
cttctccaagacaaaggtt

SEQ ID NO: 8600 - RNA, 19 nt, synthetic construct
  source 1..19: mol_type = other RNA
acttctccaagacaaaggt

SEQ ID NO: 8601 - RNA, 19 nt, synthetic construct
  source 1..19: mol_type = other RNA
cacttctccaagacaaagg

SEQ ID NO: 8602 - RNA, 19 nt, synthetic construct
  source 1..19: mol_type = other RNA
tcacttctccaagacaaag

SEQ ID NO: 8603 - RNA, 19 nt, synthetic construct
  source 1..19: mol_type = other RNA
atcacttctccaagacaaa

SEQ ID NO: 8604 - RNA, 19 nt, synthetic construct
  source 1..19: mol_type = other RNA
catcacttctccaagacaa

SEQ ID NO: 8605 - RNA, 19 nt, synthetic construct
  source 1..19: mol_type = other RNA
tcatcacttctccaagaca

SEQ ID NO: 8606 - RNA, 19 nt, synthetic construct
  source 1..19: mol_type = other RNA
ttcatcacttctccaagac

SEQ ID NO: 8607 - RNA, 19 nt, synthetic construct
  source 1..19: mol_type = other RNA
cttcatcacttctccaaga

SEQ ID NO: 8608 - RNA, 19 nt, synthetic construct
  source 1..19: mol_type = other RNA
tcttcatcacttctccaag

SEQ ID NO: 8609 - RNA, 19 nt, synthetic construct
  source 1..19: mol_type = other RNA
ttcttcatcacttctccaa

SEQ ID NO: 8610 - RNA, 19 nt, synthetic construct
  source 1..19: mol_type = other RNA
cttcttcatcacttctcca

SEQ ID NO: 8611 - RNA, 19 nt, synthetic construct
  source 1..19: mol_type = other RNA
tcttcttcatcacttctcc

SEQ ID NO: 8612 - RNA, 19 nt, synthetic construct
  source 1..19: mol_type = other RNA
atcttcttcatcacttctc

SEQ ID NO: 8613 - RNA, 19 nt, synthetic construct
  source 1..19: mol_type = other RNA
catcttcttcatcacttct

SEQ ID NO: 8614 - RNA, 19 nt, synthetic construct
  source 1..19: mol_type = other RNA
tcatcttcttcatcacttc

SEQ ID NO: 8615 - RNA, 19 nt, synthetic construct
  source 1..19: mol_type = other RNA
ttcatcttcttcatcactt

SEQ ID NO: 8616 - RNA, 19 nt, synthetic construct
  source 1..19: mol_type = other RNA
cttcatcttcttcatcact

SEQ ID NO: 8617 - RNA, 19 nt, synthetic construct
  source 1..19: mol_type = other RNA
tcttcatcttcttcatcac

SEQ ID NO: 8618 - RNA, 19 nt, synthetic construct
  source 1..19: mol_type = other RNA
gtcttcatcttcttcatca

SEQ ID NO: 8619 - RNA, 19 nt, synthetic construct
  source 1..19: mol_type = other RNA
tgtcttcatcttcttcatc

SEQ ID NO: 8620 - RNA, 19 nt, synthetic construct
  source 1..19: mol_type = other RNA
ctgtcttcatcttcttcat

SEQ ID NO: 8621 - RNA, 19 nt, synthetic construct
  source 1..19: mol_type = other RNA
actgtcttcatcttcttca

SEQ ID NO: 8622 - RNA, 19 nt, synthetic construct
  source 1..19: mol_type = other RNA
cactgtcttcatcttcttc

SEQ ID NO: 8623 - RNA, 19 nt, synthetic construct
  source 1..19: mol_type = other RNA
tcactgtcttcatcttctt

SEQ ID NO: 8624 - RNA, 19 nt, synthetic construct
  source 1..19: mol_type = other RNA
gtcactgtcttcatcttct

SEQ ID NO: 8625 - RNA, 19 nt, synthetic construct
  source 1..19: mol_type = other RNA
agtcactgtcttcatcttc

SEQ ID NO: 8626 - RNA, 19 nt, synthetic construct
  source 1..19: mol_type = other RNA
aagtcactgtcttcatctt

SEQ ID NO: 8627 - RNA, 19 nt, synthetic construct
  source 1..19: mol_type = other RNA
aaagtcactgtcttcatct

SEQ ID NO: 8628 - RNA, 19 nt, synthetic construct
  source 1..19: mol_type = other RNA
caaagtcactgtcttcatc

SEQ ID NO: 8629 - RNA, 19 nt, synthetic construct
  source 1..19: mol_type = other RNA
ccaaagtcactgtcttcat

SEQ ID NO: 8630 - RNA, 19 nt, synthetic construct
  source 1..19: mol_type = other RNA
cccaaagtcactgtcttca

SEQ ID NO: 8631 - RNA, 19 nt, synthetic construct
  source 1..19: mol_type = other RNA
ccccaaagtcactgtcttc

SEQ ID NO: 8632 - RNA, 19 nt, synthetic construct
  source 1..19: mol_type = other RNA
tccccaaagtcactgtctt

SEQ ID NO: 8633 - RNA, 19 nt, synthetic construct
  source 1..19: mol_type = other RNA
ctccccaaagtcactgtct

SEQ ID NO: 8634 - RNA, 19 nt, synthetic construct
  source 1..19: mol_type = other RNA
cctccccaaagtcactgtc

SEQ ID NO: 8635 - RNA, 19 nt, synthetic construct
  source 1..19: mol_type = other RNA
tcctccccaaagtcactgt

SEQ ID NO: 8636 - RNA, 19 nt, synthetic construct
  source 1..19: mol_type = other RNA
ttcctccccaaagtcactg

SEQ ID NO: 8637 - RNA, 19 nt, synthetic construct
  source 1..19: mol_type = other RNA
gttcctccccaaagtcact

SEQ ID NO: 8638 - RNA, 19 nt, synthetic construct
  source 1..19: mol_type = other RNA
tgttcctccccaaagtcac

SEQ ID NO: 8639 - RNA, 19 nt, synthetic construct
  source 1..19: mol_type = other RNA
ctgttcctccccaaagtca

SEQ ID NO: 8640 - RNA, 19 nt, synthetic construct
  source 1..19: mol_type = other RNA
gctgttcctccccaaagtc

SEQ ID NO: 8641 - RNA, 19 nt, synthetic construct
  source 1..19: mol_type = other RNA
cgctgttcctccccaaagt

SEQ ID NO: 8642 - RNA, 19 nt, synthetic construct
  source 1..19: mol_type = other RNA
tcgctgttcctccccaaag

SEQ ID NO: 8643 - RNA, 19 nt, synthetic construct
  source 1..19: mol_type = other RNA
ctcgctgttcctccccaaa

SEQ ID NO: 8644 - RNA, 19 nt, synthetic construct
  source 1..19: mol_type = other RNA
tctcgctgttcctccccaa

SEQ ID NO: 8645 - RNA, 19 nt, synthetic construct
  source 1..19: mol_type = other RNA
atctcgctgttcctcccca

SEQ ID NO: 8646 - RNA, 19 nt, synthetic construct
  source 1..19: mol_type = other RNA
aatctcgctgttcctcccc

SEQ ID NO: 8647 - RNA, 19 nt, synthetic construct
  source 1..19: mol_type = other RNA
caatctcgctgttcctccc

SEQ ID NO: 8648 - RNA, 19 nt, synthetic construct
  source 1..19: mol_type = other RNA
gcaatctcgctgttcctcc

SEQ ID NO: 8649 - RNA, 19 nt, synthetic construct
  source 1..19: mol_type = other RNA
agcaatctcgctgttcctc

SEQ ID NO: 8650 - RNA, 19 nt, synthetic construct
  source 1..19: mol_type = other RNA
tagcaatctcgctgttcct

SEQ ID NO: 8651 - RNA, 19 nt, synthetic construct
  source 1..19: mol_type = other RNA
gtagcaatctcgctgttcc

SEQ ID NO: 8652 - RNA, 19 nt, synthetic construct
  source 1..19: mol_type = other RNA
ggtagcaatctcgctgttc

SEQ ID NO: 8653 - RNA, 19 nt, synthetic construct
  source 1..19: mol_type = other RNA
aggtagcaatctcgctgtt

SEQ ID NO: 8654 - RNA, 19 nt, synthetic construct
  source 1..19: mol_type = other RNA
caggtagcaatctcgctgt

SEQ ID NO: 8655 - RNA, 19 nt, synthetic construct
  source 1..19: mol_type = other RNA
tcaggtagcaatctcgctg

SEQ ID NO: 8656 - RNA, 19 nt, synthetic construct
  source 1..19: mol_type = other RNA
ttcaggtagcaatctcgct

SEQ ID NO: 8657 - RNA, 19 nt, synthetic construct
  source 1..19: mol_type = other RNA
cttcaggtagcaatctcgc

SEQ ID NO: 8658 - RNA, 19 nt, synthetic construct
  source 1..19: mol_type = other RNA
ccttcaggtagcaatctcg

SEQ ID NO: 8659 - RNA, 19 nt, synthetic construct
  source 1..19: mol_type = other RNA
accttcaggtagcaatctc

SEQ ID NO: 8660 - RNA, 19 nt, synthetic construct
  source 1..19: mol_type = other RNA
caccttcaggtagcaatct

SEQ ID NO: 8661 - RNA, 19 nt, synthetic construct
  source 1..19: mol_type = other RNA
tcaccttcaggtagcaatc

SEQ ID NO: 8662 - RNA, 19 nt, synthetic construct
  source 1..19: mol_type = other RNA
ctcaccttcaggtagcaat

SEQ ID NO: 8663 - RNA, 19 nt, synthetic construct
  source 1..19: mol_type = other RNA
gctcaccttcaggtagcaa

SEQ ID NO: 8664 - RNA, 19 nt, synthetic construct
  source 1..19: mol_type = other RNA
ggctcaccttcaggtagca

SEQ ID NO: 8665 - RNA, 19 nt, synthetic construct
  source 1..19: mol_type = other RNA
tggctcaccttcaggtagc

SEQ ID NO: 8666 - RNA, 19 nt, synthetic construct
  source 1..19: mol_type = other RNA
ttggctcaccttcaggtag

SEQ ID NO: 8667 - RNA, 19 nt, synthetic construct
  source 1..19: mol_type = other RNA
attggctcaccttcaggta

SEQ ID NO: 8668 - RNA, 19 nt, synthetic construct
  source 1..19: mol_type = other RNA
gattggctcaccttcaggt

SEQ ID NO: 8669 - RNA, 19 nt, synthetic construct
  source 1..19: mol_type = other RNA
ggattggctcaccttcagg

SEQ ID NO: 8670 - RNA, 19 nt, synthetic construct
  source 1..19: mol_type = other RNA
tggattggctcaccttcag

SEQ ID NO: 8671 - RNA, 19 nt, synthetic construct
  source 1..19: mol_type = other RNA
ttggattggctcaccttca

SEQ ID NO: 8672 - RNA, 19 nt, synthetic construct
  source 1..19: mol_type = other RNA
cttggattggctcaccttc

SEQ ID NO: 8673 - RNA, 19 nt, synthetic construct
  source 1..19: mol_type = other RNA
ccttggattggctcacctt

SEQ ID NO: 8674 - RNA, 19 nt, synthetic construct
  source 1..19: mol_type = other RNA
tccttggattggctcacct

SEQ ID NO: 8675 - RNA, 19 nt, synthetic construct
  source 1..19: mol_type = other RNA
ctccttggattggctcacc

SEQ ID NO: 8676 - RNA, 19 nt, synthetic construct
  source 1..19: mol_type = other RNA
gctccttggattggctcac

SEQ ID NO: 8677 - RNA, 19 nt, synthetic construct
  source 1..19: mol_type = other RNA
tgctccttggattggctca

SEQ ID NO: 8678 - RNA, 19 nt, synthetic construct
  source 1..19: mol_type = other RNA
gtgctccttggattggctc

SEQ ID NO: 8679 - RNA, 19 nt, synthetic construct
  source 1..19: mol_type = other RNA
ggtgctccttggattggct

SEQ ID NO: 8680 - RNA, 19 nt, synthetic construct
  source 1..19: mol_type = other RNA
tggtgctccttggattggc

SEQ ID NO: 8681 - RNA, 19 nt, synthetic construct
  source 1..19: mol_type = other RNA
ctggtgctccttggattgg

SEQ ID NO: 8682 - RNA, 19 nt, synthetic construct
  source 1..19: mol_type = other RNA
gctggtgctccttggattg

SEQ ID NO: 8683 - RNA, 19 nt, synthetic construct
  source 1..19: mol_type = other RNA
tgctggtgctccttggatt

SEQ ID NO: 8684 - RNA, 19 nt, synthetic construct
  source 1..19: mol_type = other RNA
ctgctggtgctccttggat

SEQ ID NO: 8685 - RNA, 19 nt, synthetic construct
  source 1..19: mol_type = other RNA
actgctggtgctccttgga

SEQ ID NO: 8686 - RNA, 19 nt, synthetic construct
  source 1..19: mol_type = other RNA
aactgctggtgctccttgg

SEQ ID NO: 8687 - RNA, 19 nt, synthetic construct
  source 1..19: mol_type = other RNA
aaactgctggtgctccttg

SEQ ID NO: 8688 - RNA, 19 nt, synthetic construct
  source 1..19: mol_type = other RNA
taaactgctggtgctcctt

SEQ ID NO: 8689 - RNA, 19 nt, synthetic construct
  source 1..19: mol_type = other RNA
ataaactgctggtgctcct

SEQ ID NO: 8690 - RNA, 19 nt, synthetic construct
  source 1..19: mol_type = other RNA
gataaactgctggtgctcc

SEQ ID NO: 8691 - RNA, 19 nt, synthetic construct
  source 1..19: mol_type = other RNA
tgataaactgctggtgctc

SEQ ID NO: 8692 - RNA, 19 nt, synthetic construct
  source 1..19: mol_type = other RNA
gtgataaactgctggtgct

SEQ ID NO: 8693 - RNA, 19 nt, synthetic construct
  source 1..19: mol_type = other RNA
ggtgataaactgctggtgc

SEQ ID NO: 8694 - RNA, 19 nt, synthetic construct
  source 1..19: mol_type = other RNA
aggtgataaactgctggtg

SEQ ID NO: 8695 - RNA, 19 nt, synthetic construct
  source 1..19: mol_type = other RNA
aaggtgataaactgctggt

SEQ ID NO: 8696 - RNA, 19 nt, synthetic construct
  source 1..19: mol_type = other RNA
gaaggtgataaactgctgg

SEQ ID NO: 8697 - RNA, 19 nt, synthetic construct
  source 1..19: mol_type = other RNA
agaaggtgataaactgctg

SEQ ID NO: 8698 - RNA, 19 nt, synthetic construct
  source 1..19: mol_type = other RNA
aagaaggtgataaactgct

SEQ ID NO: 8699 - RNA, 19 nt, synthetic construct
  source 1..19: mol_type = other RNA
taagaaggtgataaactgc

SEQ ID NO: 8700 - RNA, 19 nt, synthetic construct
  source 1..19: mol_type = other RNA
gtaagaaggtgataaactg

SEQ ID NO: 8701 - RNA, 19 nt, synthetic construct
  source 1..19: mol_type = other RNA
tgtaagaaggtgataaact

SEQ ID NO: 8702 - RNA, 19 nt, synthetic construct
  source 1..19: mol_type = other RNA
ctgtaagaaggtgataaac

SEQ ID NO: 8703 - RNA, 19 nt, synthetic construct
  source 1..19: mol_type = other RNA
tctgtaagaaggtgataaa

SEQ ID NO: 8704 - RNA, 19 nt, synthetic construct
  source 1..19: mol_type = other RNA
ctctgtaagaaggtgataa

SEQ ID NO: 8705 - RNA, 19 nt, synthetic construct
  source 1..19: mol_type = other RNA
tctctgtaagaaggtgata

SEQ ID NO: 8706 - RNA, 19 nt, synthetic construct
  source 1..19: mol_type = other RNA
gtctctgtaagaaggtgat

SEQ ID NO: 8707 - RNA, 19 nt, synthetic construct
  source 1..19: mol_type = other RNA
agtctctgtaagaaggtga

SEQ ID NO: 8708 - RNA, 19 nt, synthetic construct
  source 1..19: mol_type = other RNA
gagtctctgtaagaaggtg

SEQ ID NO: 8709 - RNA, 19 nt, synthetic construct
  source 1..19: mol_type = other RNA
ggagtctctgtaagaaggt

SEQ ID NO: 8710 - RNA, 19 nt, synthetic construct
  source 1..19: mol_type = other RNA
aggagtctctgtaagaagg

SEQ ID NO: 8711 - RNA, 19 nt, synthetic construct
  source 1..19: mol_type = other RNA
aaggagtctctgtaagaag

SEQ ID NO: 8712 - RNA, 19 nt, synthetic construct
  source 1..19: mol_type = other RNA
caaggagtctctgtaagaa

SEQ ID NO: 8713 - RNA, 19 nt, synthetic construct
  source 1..19: mol_type = other RNA
ccaaggagtctctgtaaga

SEQ ID NO: 8714 - RNA, 19 nt, synthetic construct
  source 1..19: mol_type = other RNA
cccaaggagtctctgtaag

SEQ ID NO: 8715 - RNA, 19 nt, synthetic construct
  source 1..19: mol_type = other RNA
gcccaaggagtctctgtaa

SEQ ID NO: 8716 - RNA, 19 nt, synthetic construct
  source 1..19: mol_type = other RNA
ggcccaaggagtctctgta

SEQ ID NO: 8717 - RNA, 19 nt, synthetic construct
  source 1..19: mol_type = other RNA
aggcccaaggagtctctgt

SEQ ID NO: 8718 - RNA, 19 nt, synthetic construct
  source 1..19: mol_type = other RNA
aaggcccaaggagtctctg

SEQ ID NO: 8719 - RNA, 19 nt, synthetic construct
  source 1..19: mol_type = other RNA
aaaggcccaaggagtctct

SEQ ID NO: 8720 - RNA, 19 nt, synthetic construct
  source 1..19: mol_type = other RNA
caaaggcccaaggagtctc

SEQ ID NO: 8721 - RNA, 19 nt, synthetic construct
  source 1..19: mol_type = other RNA
gcaaaggcccaaggagtct

SEQ ID NO: 8722 - RNA, 19 nt, synthetic construct
  source 1..19: mol_type = other RNA
agcaaaggcccaaggagtc

SEQ ID NO: 8723 - RNA, 19 nt, synthetic construct
  source 1..19: mol_type = other RNA
cagcaaaggcccaaggagt

SEQ ID NO: 8724 - RNA, 19 nt, synthetic construct
  source 1..19: mol_type = other RNA
ccagcaaaggcccaaggag

SEQ ID NO: 8725 - RNA, 19 nt, synthetic construct
  source 1..19: mol_type = other RNA
tccagcaaaggcccaagga

SEQ ID NO: 8726 - RNA, 19 nt, synthetic construct
  source 1..19: mol_type = other RNA
ctccagcaaaggcccaagg

SEQ ID NO: 8727 - RNA, 19 nt, synthetic construct
  source 1..19: mol_type = other RNA
cctccagcaaaggcccaag

SEQ ID NO: 8728 - RNA, 19 nt, synthetic construct
  source 1..19: mol_type = other RNA
gcctccagcaaaggcccaa

SEQ ID NO: 8729 - RNA, 19 nt, synthetic construct
  source 1..19: mol_type = other RNA
ggcctccagcaaaggccca

SEQ ID NO: 8730 - RNA, 19 nt, synthetic construct
  source 1..19: mol_type = other RNA
aggcctccagcaaaggccc

SEQ ID NO: 8731 - RNA, 19 nt, synthetic construct
  source 1..19: mol_type = other RNA
taggcctccagcaaaggcc

SEQ ID NO: 8732 - RNA, 19 nt, synthetic construct
  source 1..19: mol_type = other RNA
gtaggcctccagcaaaggc

SEQ ID NO: 8733 - RNA, 19 nt, synthetic construct
  source 1..19: mol_type = other RNA
tgtaggcctccagcaaagg

SEQ ID NO: 8734 - RNA, 19 nt, synthetic construct
  source 1..19: mol_type = other RNA
ctgtaggcctccagcaaag

SEQ ID NO: 8735 - RNA, 19 nt, synthetic construct
  source 1..19: mol_type = other RNA
gctgtaggcctccagcaaa

SEQ ID NO: 8736 - RNA, 19 nt, synthetic construct
  source 1..19: mol_type = other RNA
agctgtaggcctccagcaa

SEQ ID NO: 8737 - RNA, 19 nt, synthetic construct
  source 1..19: mol_type = other RNA
gagctgtaggcctccagca

SEQ ID NO: 8738 - RNA, 19 nt, synthetic construct
  source 1..19: mol_type = other RNA
agagctgtaggcctccagc

SEQ ID NO: 8739 - RNA, 19 nt, synthetic construct
  source 1..19: mol_type = other RNA
cagagctgtaggcctccag

SEQ ID NO: 8740 - RNA, 19 nt, synthetic construct
  source 1..19: mol_type = other RNA
gcagagctgtaggcctcca

SEQ ID NO: 8741 - RNA, 19 nt, synthetic construct
  source 1..19: mol_type = other RNA
agcagagctgtaggcctcc

SEQ ID NO: 8742 - RNA, 19 nt, synthetic construct
  source 1..19: mol_type = other RNA
cagcagagctgtaggcctc

SEQ ID NO: 8743 - RNA, 19 nt, synthetic construct
  source 1..19: mol_type = other RNA
gcagcagagctgtaggcct

SEQ ID NO: 8744 - RNA, 19 nt, synthetic construct
  source 1..19: mol_type = other RNA
ggcagcagagctgtaggcc

SEQ ID NO: 8745 - RNA, 19 nt, synthetic construct
  source 1..19: mol_type = other RNA
tggcagcagagctgtaggc

SEQ ID NO: 8746 - RNA, 19 nt, synthetic construct
  source 1..19: mol_type = other RNA
atggcagcagagctgtagg

SEQ ID NO: 8747 - RNA, 19 nt, synthetic construct
  source 1..19: mol_type = other RNA
gatggcagcagagctgtag

SEQ ID NO: 8748 - RNA, 19 nt, synthetic construct
  source 1..19: mol_type = other RNA
agatggcagcagagctgta

SEQ ID NO: 8749 - RNA, 19 nt, synthetic construct
  source 1..19: mol_type = other RNA
aagatggcagcagagctgt

SEQ ID NO: 8750 - RNA, 19 nt, synthetic construct
  source 1..19: mol_type = other RNA
aaagatggcagcagagctg

SEQ ID NO: 8751 - RNA, 19 nt, synthetic construct
  source 1..19: mol_type = other RNA
caaagatggcagcagagct

SEQ ID NO: 8752 - RNA, 19 nt, synthetic construct
  source 1..19: mol_type = other RNA
acaaagatggcagcagagc

SEQ ID NO: 8753 - RNA, 19 nt, synthetic construct
  source 1..19: mol_type = other RNA
aacaaagatggcagcagag

SEQ ID NO: 8754 - RNA, 19 nt, synthetic construct
  source 1..19: mol_type = other RNA
gaacaaagatggcagcaga

SEQ ID NO: 8755 - RNA, 19 nt, synthetic construct
  source 1..19: mol_type = other RNA
tgaacaaagatggcagcag

SEQ ID NO: 8756 - RNA, 19 nt, synthetic construct
  source 1..19: mol_type = other RNA
gtgaacaaagatggcagca

SEQ ID NO: 8757 - RNA, 19 nt, synthetic construct
  source 1..19: mol_type = other RNA
tgtgaacaaagatggcagc

SEQ ID NO: 8758 - RNA, 19 nt, synthetic construct
  source 1..19: mol_type = other RNA
ttgtgaacaaagatggcag

SEQ ID NO: 8759 - RNA, 19 nt, synthetic construct
  source 1..19: mol_type = other RNA
gttgtgaacaaagatggca

SEQ ID NO: 8760 - RNA, 19 nt, synthetic construct
  source 1..19: mol_type = other RNA
agttgtgaacaaagatggc

SEQ ID NO: 8761 - RNA, 19 nt, synthetic construct
  source 1..19: mol_type = other RNA
aagttgtgaacaaagatgg

SEQ ID NO: 8762 - RNA, 19 nt, synthetic construct
  source 1..19: mol_type = other RNA
gaagttgtgaacaaagatg

SEQ ID NO: 8763 - RNA, 19 nt, synthetic construct
  source 1..19: mol_type = other RNA
tgaagttgtgaacaaagat

SEQ ID NO: 8764 - RNA, 19 nt, synthetic construct
  source 1..19: mol_type = other RNA
ctgaagttgtgaacaaaga

SEQ ID NO: 8765 - RNA, 19 nt, synthetic construct
  source 1..19: mol_type = other RNA
actgaagttgtgaacaaag

SEQ ID NO: 8766 - RNA, 19 nt, synthetic construct
  source 1..19: mol_type = other RNA
cactgaagttgtgaacaaa

SEQ ID NO: 8767 - RNA, 19 nt, synthetic construct
  source 1..19: mol_type = other RNA
ccactgaagttgtgaacaa

SEQ ID NO: 8768 - RNA, 19 nt, synthetic construct
  source 1..19: mol_type = other RNA
accactgaagttgtgaaca

SEQ ID NO: 8769 - RNA, 19 nt, synthetic construct
  source 1..19: mol_type = other RNA
gaccactgaagttgtgaac

SEQ ID NO: 8770 - RNA, 19 nt, synthetic construct
  source 1..19: mol_type = other RNA
ggaccactgaagttgtgaa

SEQ ID NO: 8771 - RNA, 19 nt, synthetic construct
  source 1..19: mol_type = other RNA
aggaccactgaagttgtga

SEQ ID NO: 8772 - RNA, 19 nt, synthetic construct
  source 1..19: mol_type = other RNA
caggaccactgaagttgtg

SEQ ID NO: 8773 - RNA, 19 nt, synthetic construct
  source 1..19: mol_type = other RNA
acaggaccactgaagttgt

SEQ ID NO: 8774 - RNA, 19 nt, synthetic construct
  source 1..19: mol_type = other RNA
aacaggaccactgaagttg

SEQ ID NO: 8775 - RNA, 19 nt, synthetic construct
  source 1..19: mol_type = other RNA
gaacaggaccactgaagtt

SEQ ID NO: 8776 - RNA, 19 nt, synthetic construct
  source 1..19: mol_type = other RNA
ggaacaggaccactgaagt

SEQ ID NO: 8777 - RNA, 19 nt, synthetic construct
  source 1..19: mol_type = other RNA
tggaacaggaccactgaag

SEQ ID NO: 8778 - RNA, 19 nt, synthetic construct
  source 1..19: mol_type = other RNA
ctggaacaggaccactgaa

SEQ ID NO: 8779 - RNA, 19 nt, synthetic construct
  source 1..19: mol_type = other RNA
tctggaacaggaccactga

SEQ ID NO: 8780 - RNA, 19 nt, synthetic construct
  source 1..19: mol_type = other RNA
ttctggaacaggaccactg

SEQ ID NO: 8781 - RNA, 19 nt, synthetic construct
  source 1..19: mol_type = other RNA
gttctggaacaggaccact

SEQ ID NO: 8782 - RNA, 19 nt, synthetic construct
  source 1..19: mol_type = other RNA
ggttctggaacaggaccac

SEQ ID NO: 8783 - RNA, 19 nt, synthetic construct
  source 1..19: mol_type = other RNA
aggttctggaacaggacca

SEQ ID NO: 8784 - RNA, 19 nt, synthetic construct
  source 1..19: mol_type = other RNA
caggttctggaacaggacc

SEQ ID NO: 8785 - RNA, 19 nt, synthetic construct
  source 1..19: mol_type = other RNA
tcaggttctggaacaggac

SEQ ID NO: 8786 - RNA, 19 nt, synthetic construct
  source 1..19: mol_type = other RNA
ctcaggttctggaacagga

SEQ ID NO: 8787 - RNA, 19 nt, synthetic construct
  source 1..19: mol_type = other RNA
actcaggttctggaacagg

SEQ ID NO: 8788 - RNA, 19 nt, synthetic construct
  source 1..19: mol_type = other RNA
tactcaggttctggaacag

SEQ ID NO: 8789 - RNA, 19 nt, synthetic construct
  source 1..19: mol_type = other RNA
atactcaggttctggaaca

SEQ ID NO: 8790 - RNA, 19 nt, synthetic construct
  source 1..19: mol_type = other RNA
gatactcaggttctggaac

SEQ ID NO: 8791 - RNA, 19 nt, synthetic construct
  source 1..19: mol_type = other RNA
agatactcaggttctggaa

SEQ ID NO: 8792 - RNA, 19 nt, synthetic construct
  source 1..19: mol_type = other RNA
cagatactcaggttctgga

SEQ ID NO: 8793 - RNA, 19 nt, synthetic construct
  source 1..19: mol_type = other RNA
gcagatactcaggttctgg

SEQ ID NO: 8794 - RNA, 19 nt, synthetic construct
  source 1..19: mol_type = other RNA
tgcagatactcaggttctg

SEQ ID NO: 8795 - RNA, 19 nt, synthetic construct
  source 1..19: mol_type = other RNA
ttgcagatactcaggttct

SEQ ID NO: 8796 - RNA, 19 nt, synthetic construct
  source 1..19: mol_type = other RNA
tttgcagatactcaggttc

SEQ ID NO: 8797 - RNA, 19 nt, synthetic construct
  source 1..19: mol_type = other RNA
ttttgcagatactcaggtt

SEQ ID NO: 8798 - RNA, 19 nt, synthetic construct
  source 1..19: mol_type = other RNA
cttttgcagatactcaggt

SEQ ID NO: 8799 - RNA, 19 nt, synthetic construct
  source 1..19: mol_type = other RNA
acttttgcagatactcagg

SEQ ID NO: 8800 - RNA, 19 nt, synthetic construct
  source 1..19: mol_type = other RNA
aacttttgcagatactcag

SEQ ID NO: 8801 - RNA, 19 nt, synthetic construct
  source 1..19: mol_type = other RNA
caacttttgcagatactca

SEQ ID NO: 8802 - RNA, 19 nt, synthetic construct
  source 1..19: mol_type = other RNA
gcaacttttgcagatactc

SEQ ID NO: 8803 - RNA, 19 nt, synthetic construct
  source 1..19: mol_type = other RNA
tgcaacttttgcagatact

SEQ ID NO: 8804 - RNA, 19 nt, synthetic construct
  source 1..19: mol_type = other RNA
gtgcaacttttgcagatac

SEQ ID NO: 8805 - RNA, 19 nt, synthetic construct
  source 1..19: mol_type = other RNA
tgtgcaacttttgcagata

SEQ ID NO: 8806 - RNA, 19 nt, synthetic construct
  source 1..19: mol_type = other RNA
ttgtgcaacttttgcagat

SEQ ID NO: 8807 - RNA, 19 nt, synthetic construct
  source 1..19: mol_type = other RNA
tttgtgcaacttttgcaga

SEQ ID NO: 8808 - RNA, 19 nt, synthetic construct
  source 1..19: mol_type = other RNA
atttgtgcaacttttgcag

SEQ ID NO: 8809 - RNA, 19 nt, synthetic construct
  source 1..19: mol_type = other RNA
tatttgtgcaacttttgca

SEQ ID NO: 8810 - RNA, 19 nt, synthetic construct
  source 1..19: mol_type = other RNA
gtatttgtgcaacttttgc

SEQ ID NO: 8811 - RNA, 19 nt, synthetic construct
  source 1..19: mol_type = other RNA
ggtatttgtgcaacttttg

SEQ ID NO: 8812 - RNA, 19 nt, synthetic construct
  source 1..19: mol_type = other RNA
aggtatttgtgcaactttt

SEQ ID NO: 8813 - RNA, 19 nt, synthetic construct
  source 1..19: mol_type = other RNA
taggtatttgtgcaacttt

SEQ ID NO: 8814 - RNA, 19 nt, synthetic construct
  source 1..19: mol_type = other RNA
ttaggtatttgtgcaactt

SEQ ID NO: 8815 - RNA, 19 nt, synthetic construct
  source 1..19: mol_type = other RNA
attaggtatttgtgcaact

SEQ ID NO: 8816 - RNA, 19 nt, synthetic construct
  source 1..19: mol_type = other RNA
tattaggtatttgtgcaac

SEQ ID NO: 8817 - RNA, 19 nt, synthetic construct
  source 1..19: mol_type = other RNA
ttattaggtatttgtgcaa

SEQ ID NO: 8818 - RNA, 19 nt, synthetic construct
  source 1..19: mol_type = other RNA
gttattaggtatttgtgca

SEQ ID NO: 8819 - RNA, 19 nt, synthetic construct
  source 1..19: mol_type = other RNA
ggttattaggtatttgtgc

SEQ ID NO: 8820 - RNA, 19 nt, synthetic construct
  source 1..19: mol_type = other RNA
tggttattaggtatttgtg

SEQ ID NO: 8821 - RNA, 19 nt, synthetic construct
  source 1..19: mol_type = other RNA
ctggttattaggtatttgt

SEQ ID NO: 8822 - RNA, 19 nt, synthetic construct
  source 1..19: mol_type = other RNA
tctggttattaggtatttg

SEQ ID NO: 8823 - RNA, 19 nt, synthetic construct
  source 1..19: mol_type = other RNA
ttctggttattaggtattt

SEQ ID NO: 8824 - RNA, 19 nt, synthetic construct
  source 1..19: mol_type = other RNA
gttctggttattaggtatt

SEQ ID NO: 8825 - RNA, 19 nt, synthetic construct
  source 1..19: mol_type = other RNA
tgttctggttattaggtat

SEQ ID NO: 8826 - RNA, 19 nt, synthetic construct
  source 1..19: mol_type = other RNA
ctgttctggttattaggta

SEQ ID NO: 8827 - RNA, 19 nt, synthetic construct
  source 1..19: mol_type = other RNA
tctgttctggttattaggt

SEQ ID NO: 8828 - RNA, 19 nt, synthetic construct
  source 1..19: mol_type = other RNA
ttctgttctggttattagg

SEQ ID NO: 8829 - RNA, 19 nt, synthetic construct
  source 1..19: mol_type = other RNA
tttctgttctggttattag

SEQ ID NO: 8830 - RNA, 19 nt, synthetic construct
  source 1..19: mol_type = other RNA
ctttctgttctggttatta

SEQ ID NO: 8831 - RNA, 19 nt, synthetic construct
  source 1..19: mol_type = other RNA
tctttctgttctggttatt

SEQ ID NO: 8832 - RNA, 19 nt, synthetic construct
  source 1..19: mol_type = other RNA
ttctttctgttctggttat

SEQ ID NO: 8833 - RNA, 19 nt, synthetic construct
  source 1..19: mol_type = other RNA
tttctttctgttctggtta

SEQ ID NO: 8834 - RNA, 19 nt, synthetic construct
  source 1..19: mol_type = other RNA
atttctttctgttctggtt

SEQ ID NO: 8835 - RNA, 19 nt, synthetic construct
  source 1..19: mol_type = other RNA
catttctttctgttctggt

SEQ ID NO: 8836 - RNA, 19 nt, synthetic construct
  source 1..19: mol_type = other RNA
acatttctttctgttctgg

SEQ ID NO: 8837 - RNA, 19 nt, synthetic construct
  source 1..19: mol_type = other RNA
aacatttctttctgttctg

SEQ ID NO: 8838 - RNA, 19 nt, synthetic construct
  source 1..19: mol_type = other RNA
caacatttctttctgttct

SEQ ID NO: 8839 - RNA, 19 nt, synthetic construct
  source 1..19: mol_type = other RNA
gcaacatttctttctgttc

SEQ ID NO: 8840 - RNA, 19 nt, synthetic construct
  source 1..19: mol_type = other RNA
tgcaacatttctttctgtt

SEQ ID NO: 8841 - RNA, 19 nt, synthetic construct
  source 1..19: mol_type = other RNA
ctgcaacatttctttctgt

SEQ ID NO: 8842 - RNA, 19 nt, synthetic construct
  source 1..19: mol_type = other RNA
actgcaacatttctttctg

SEQ ID NO: 8843 - RNA, 19 nt, synthetic construct
  source 1..19: mol_type = other RNA
tactgcaacatttctttct

SEQ ID NO: 8844 - RNA, 19 nt, synthetic construct
  source 1..19: mol_type = other RNA
atactgcaacatttctttc

SEQ ID NO: 8845 - RNA, 19 nt, synthetic construct
  source 1..19: mol_type = other RNA
tatactgcaacatttcttt

SEQ ID NO: 8846 - RNA, 19 nt, synthetic construct
  source 1..19: mol_type = other RNA
atatactgcaacatttctt

SEQ ID NO: 8847 - RNA, 19 nt, synthetic construct
  source 1..19: mol_type = other RNA
catatactgcaacatttct

SEQ ID NO: 8848 - RNA, 19 nt, synthetic construct
  source 1..19: mol_type = other RNA
gcatatactgcaacatttc

SEQ ID NO: 8849 - RNA, 19 nt, synthetic construct
  source 1..19: mol_type = other RNA
agcatatactgcaacattt

SEQ ID NO: 8850 - RNA, 19 nt, synthetic construct
  source 1..19: mol_type = other RNA
cagcatatactgcaacatt

SEQ ID NO: 8851 - RNA, 19 nt, synthetic construct
  source 1..19: mol_type = other RNA
tcagcatatactgcaacat

SEQ ID NO: 8852 - RNA, 19 nt, synthetic construct
  source 1..19: mol_type = other RNA
ctcagcatatactgcaaca

SEQ ID NO: 8853 - RNA, 19 nt, synthetic construct
  source 1..19: mol_type = other RNA
tctcagcatatactgcaac

SEQ ID NO: 8854 - RNA, 19 nt, synthetic construct
  source 1..19: mol_type = other RNA
ctctcagcatatactgcaa

SEQ ID NO: 8855 - RNA, 19 nt, synthetic construct
  source 1..19: mol_type = other RNA
actctcagcatatactgca

SEQ ID NO: 8856 - RNA, 19 nt, synthetic construct
  source 1..19: mol_type = other RNA
cactctcagcatatactgc

SEQ ID NO: 8857 - RNA, 19 nt, synthetic construct
  source 1..19: mol_type = other RNA
gcactctcagcatatactg

SEQ ID NO: 8858 - RNA, 19 nt, synthetic construct
  source 1..19: mol_type = other RNA
ggcactctcagcatatact

SEQ ID NO: 8859 - RNA, 19 nt, synthetic construct
  source 1..19: mol_type = other RNA
tggcactctcagcatatac

SEQ ID NO: 8860 - RNA, 19 nt, synthetic construct
  source 1..19: mol_type = other RNA
gtggcactctcagcatata

SEQ ID NO: 8861 - RNA, 19 nt, synthetic construct
  source 1..19: mol_type = other RNA
tgtggcactctcagcatat

SEQ ID NO: 8862 - RNA, 19 nt, synthetic construct
  source 1..19: mol_type = other RNA
atgtggcactctcagcata

SEQ ID NO: 8863 - RNA, 19 nt, synthetic construct
  source 1..19: mol_type = other RNA
tatgtggcactctcagcat

SEQ ID NO: 8864 - RNA, 19 nt, synthetic construct
  source 1..19: mol_type = other RNA
atatgtggcactctcagca

SEQ ID NO: 8865 - RNA, 19 nt, synthetic construct
  source 1..19: mol_type = other RNA
aatatgtggcactctcagc

SEQ ID NO: 8866 - RNA, 19 nt, synthetic construct
  source 1..19: mol_type = other RNA
caatatgtggcactctcag

SEQ ID NO: 8867 - RNA, 19 nt, synthetic construct
  source 1..19: mol_type = other RNA
acaatatgtggcactctca

SEQ ID NO: 8868 - RNA, 19 nt, synthetic construct
  source 1..19: mol_type = other RNA
gacaatatgtggcactctc

SEQ ID NO: 8869 - RNA, 19 nt, synthetic construct
  source 1..19: mol_type = other RNA
agacaatatgtggcactct

SEQ ID NO: 8870 - RNA, 19 nt, synthetic construct
  source 1..19: mol_type = other RNA
aagacaatatgtggcactc

SEQ ID NO: 8871 - RNA, 19 nt, synthetic construct
  source 1..19: mol_type = other RNA
caagacaatatgtggcact

SEQ ID NO: 8872 - RNA, 19 nt, synthetic construct
  source 1..19: mol_type = other RNA
acaagacaatatgtggcac

SEQ ID NO: 8873 - RNA, 19 nt, synthetic construct
  source 1..19: mol_type = other RNA
cacaagacaatatgtggca

SEQ ID NO: 8874 - RNA, 19 nt, synthetic construct
  source 1..19: mol_type = other RNA
tcacaagacaatatgtggc

SEQ ID NO: 8875 - RNA, 19 nt, synthetic construct
  source 1..19: mol_type = other RNA
ttcacaagacaatatgtgg

SEQ ID NO: 8876 - RNA, 19 nt, synthetic construct
  source 1..19: mol_type = other RNA
cttcacaagacaatatgtg

SEQ ID NO: 8877 - RNA, 19 nt, synthetic construct
  source 1..19: mol_type = other RNA
tcttcacaagacaatatgt

SEQ ID NO: 8878 - RNA, 19 nt, synthetic construct
  source 1..19: mol_type = other RNA
ttcttcacaagacaatatg

SEQ ID NO: 8879 - RNA, 19 nt, synthetic construct
  source 1..19: mol_type = other RNA
attcttcacaagacaatat

SEQ ID NO: 8880 - RNA, 19 nt, synthetic construct
  source 1..19: mol_type = other RNA
cattcttcacaagacaata

SEQ ID NO: 8881 - RNA, 19 nt, synthetic construct
  source 1..19: mol_type = other RNA
gcattcttcacaagacaat

SEQ ID NO: 8882 - RNA, 19 nt, synthetic construct
  source 1..19: mol_type = other RNA
agcattcttcacaagacaa

SEQ ID NO: 8883 - RNA, 19 nt, synthetic construct
  source 1..19: mol_type = other RNA
cagcattcttcacaagaca

SEQ ID NO: 8884 - RNA, 19 nt, synthetic construct
  source 1..19: mol_type = other RNA
acagcattcttcacaagac

SEQ ID NO: 8885 - RNA, 19 nt, synthetic construct
  source 1..19: mol_type = other RNA
cacagcattcttcacaaga

SEQ ID NO: 8886 - RNA, 19 nt, synthetic construct
  source 1..19: mol_type = other RNA
tcacagcattcttcacaag

SEQ ID NO: 8887 - RNA, 19 nt, synthetic construct
  source 1..19: mol_type = other RNA
ttcacagcattcttcacaa

SEQ ID NO: 8888 - RNA, 19 nt, synthetic construct
  source 1..19: mol_type = other RNA
tttcacagcattcttcaca

SEQ ID NO: 8889 - RNA, 19 nt, synthetic construct
  source 1..19: mol_type = other RNA
ttttcacagcattcttcac

SEQ ID NO: 8890 - RNA, 19 nt, synthetic construct
  source 1..19: mol_type = other RNA
attttcacagcattcttca

SEQ ID NO: 8891 - RNA, 19 nt, synthetic construct
  source 1..19: mol_type = other RNA
cattttcacagcattcttc

SEQ ID NO: 8892 - RNA, 19 nt, synthetic construct
  source 1..19: mol_type = other RNA
acattttcacagcattctt

SEQ ID NO: 8893 - RNA, 19 nt, synthetic construct
  source 1..19: mol_type = other RNA
aacattttcacagcattct

SEQ ID NO: 8894 - RNA, 19 nt, synthetic construct
  source 1..19: mol_type = other RNA
aaacattttcacagcattc

SEQ ID NO: 8895 - RNA, 19 nt, synthetic construct
  source 1..19: mol_type = other RNA
taaacattttcacagcatt

SEQ ID NO: 8896 - RNA, 19 nt, synthetic construct
  source 1..19: mol_type = other RNA
ttaaacattttcacagcat

SEQ ID NO: 8897 - RNA, 19 nt, synthetic construct
  source 1..19: mol_type = other RNA
cttaaacattttcacagca

SEQ ID NO: 8898 - RNA, 19 nt, synthetic construct
  source 1..19: mol_type = other RNA
ccttaaacattttcacagc

SEQ ID NO: 8899 - RNA, 19 nt, synthetic construct
  source 1..19: mol_type = other RNA
tccttaaacattttcacag

SEQ ID NO: 8900 - RNA, 19 nt, synthetic construct
  source 1..19: mol_type = other RNA
atccttaaacattttcaca

SEQ ID NO: 8901 - RNA, 19 nt, synthetic construct
  source 1..19: mol_type = other RNA
tatccttaaacattttcac

SEQ ID NO: 8902 - RNA, 19 nt, synthetic construct
  source 1..19: mol_type = other RNA
atatccttaaacattttca

SEQ ID NO: 8903 - RNA, 19 nt, synthetic construct
  source 1..19: mol_type = other RNA
aatatccttaaacattttc

SEQ ID NO: 8904 - RNA, 19 nt, synthetic construct
  source 1..19: mol_type = other RNA
caatatccttaaacatttt

SEQ ID NO: 8905 - RNA, 19 nt, synthetic construct
  source 1..19: mol_type = other RNA
ccaatatccttaaacattt

SEQ ID NO: 8906 - RNA, 19 nt, synthetic construct
  source 1..19: mol_type = other RNA
cccaatatccttaaacatt

SEQ ID NO: 8907 - RNA, 19 nt, synthetic construct
  source 1..19: mol_type = other RNA
ccccaatatccttaaacat

SEQ ID NO: 8908 - RNA, 19 nt, synthetic construct
  source 1..19: mol_type = other RNA
accccaatatccttaaaca

SEQ ID NO: 8909 - RNA, 19 nt, synthetic construct
  source 1..19: mol_type = other RNA
aaccccaatatccttaaac

SEQ ID NO: 8910 - RNA, 19 nt, synthetic construct
  source 1..19: mol_type = other RNA
aaaccccaatatccttaaa

SEQ ID NO: 8911 - RNA, 19 nt, synthetic construct
  source 1..19: mol_type = other RNA
aaaaccccaatatccttaa

SEQ ID NO: 8912 - RNA, 19 nt, synthetic construct
  source 1..19: mol_type = other RNA
gaaaaccccaatatcctta

SEQ ID NO: 8913 - RNA, 19 nt, synthetic construct
  source 1..19: mol_type = other RNA
tgaaaaccccaatatcctt

SEQ ID NO: 8914 - RNA, 19 nt, synthetic construct
  source 1..19: mol_type = other RNA
ttgaaaaccccaatatcct

SEQ ID NO: 8915 - RNA, 19 nt, synthetic construct
  source 1..19: mol_type = other RNA
cttgaaaaccccaatatcc

SEQ ID NO: 8916 - RNA, 19 nt, synthetic construct
  source 1..19: mol_type = other RNA
ccttgaaaaccccaatatc

SEQ ID NO: 8917 - RNA, 19 nt, synthetic construct
  source 1..19: mol_type = other RNA
tccttgaaaaccccaatat

SEQ ID NO: 8918 - RNA, 19 nt, synthetic construct
  source 1..19: mol_type = other RNA
ctccttgaaaaccccaata

SEQ ID NO: 8919 - RNA, 19 nt, synthetic construct
  source 1..19: mol_type = other RNA
tctccttgaaaaccccaat

SEQ ID NO: 8920 - RNA, 19 nt, synthetic construct
  source 1..19: mol_type = other RNA
gtctccttgaaaaccccaa

SEQ ID NO: 8921 - RNA, 19 nt, synthetic construct
  source 1..19: mol_type = other RNA
ggtctccttgaaaacccca

SEQ ID NO: 8922 - RNA, 19 nt, synthetic construct
  source 1..19: mol_type = other RNA
tggtctccttgaaaacccc

SEQ ID NO: 8923 - RNA, 19 nt, synthetic construct
  source 1..19: mol_type = other RNA
ttggtctccttgaaaaccc

SEQ ID NO: 8924 - RNA, 19 nt, synthetic construct
  source 1..19: mol_type = other RNA
tttggtctccttgaaaacc

SEQ ID NO: 8925 - RNA, 19 nt, synthetic construct
  source 1..19: mol_type = other RNA
gtttggtctccttgaaaac

SEQ ID NO: 8926 - RNA, 19 nt, synthetic construct
  source 1..19: mol_type = other RNA
tgtttggtctccttgaaaa

SEQ ID NO: 8927 - RNA, 19 nt, synthetic construct
  source 1..19: mol_type = other RNA
ttgtttggtctccttgaaa

SEQ ID NO: 8928 - RNA, 19 nt, synthetic construct
  source 1..19: mol_type = other RNA
tttgtttggtctccttgaa

SEQ ID NO: 8929 - RNA, 19 nt, synthetic construct
  source 1..19: mol_type = other RNA
ttttgtttggtctccttga

SEQ ID NO: 8930 - RNA, 19 nt, synthetic construct
  source 1..19: mol_type = other RNA
cttttgtttggtctccttg

SEQ ID NO: 8931 - RNA, 19 nt, synthetic construct
  source 1..19: mol_type = other RNA
tcttttgtttggtctcctt

SEQ ID NO: 8932 - RNA, 19 nt, synthetic construct
  source 1..19: mol_type = other RNA
ctcttttgtttggtctcct

SEQ ID NO: 8933 - RNA, 19 nt, synthetic construct
  source 1..19: mol_type = other RNA
tctcttttgtttggtctcc

SEQ ID NO: 8934 - RNA, 19 nt, synthetic construct
  source 1..19: mol_type = other RNA
ctctcttttgtttggtctc

SEQ ID NO: 8935 - RNA, 19 nt, synthetic construct
  source 1..19: mol_type = other RNA
actctcttttgtttggtct

SEQ ID NO: 8936 - RNA, 19 nt, synthetic construct
  source 1..19: mol_type = other RNA
cactctcttttgtttggtc

SEQ ID NO: 8937 - RNA, 19 nt, synthetic construct
  source 1..19: mol_type = other RNA
acactctcttttgtttggt

SEQ ID NO: 8938 - RNA, 19 nt, synthetic construct
  source 1..19: mol_type = other RNA
gacactctcttttgtttgg

SEQ ID NO: 8939 - RNA, 19 nt, synthetic construct
  source 1..19: mol_type = other RNA
agacactctcttttgtttg

SEQ ID NO: 8940 - RNA, 19 nt, synthetic construct
  source 1..19: mol_type = other RNA
cagacactctcttttgttt

SEQ ID NO: 8941 - RNA, 19 nt, synthetic construct
  source 1..19: mol_type = other RNA
acagacactctcttttgtt

SEQ ID NO: 8942 - RNA, 19 nt, synthetic construct
  source 1..19: mol_type = other RNA
aacagacactctcttttgt

SEQ ID NO: 8943 - RNA, 19 nt, synthetic construct
  source 1..19: mol_type = other RNA
aaacagacactctcttttg

SEQ ID NO: 8944 - RNA, 19 nt, synthetic construct
  source 1..19: mol_type = other RNA
aaaacagacactctctttt

SEQ ID NO: 8945 - RNA, 19 nt, synthetic construct
  source 1..19: mol_type = other RNA
taaaacagacactctcttt

SEQ ID NO: 8946 - RNA, 19 nt, synthetic construct
  source 1..19: mol_type = other RNA
ctaaaacagacactctctt

SEQ ID NO: 8947 - RNA, 19 nt, synthetic construct
  source 1..19: mol_type = other RNA
tctaaaacagacactctct

SEQ ID NO: 8948 - RNA, 19 nt, synthetic construct
  source 1..19: mol_type = other RNA
ttctaaaacagacactctc

SEQ ID NO: 8949 - RNA, 19 nt, synthetic construct
  source 1..19: mol_type = other RNA
gttctaaaacagacactct

SEQ ID NO: 8950 - RNA, 19 nt, synthetic construct
  source 1..19: mol_type = other RNA
agttctaaaacagacactc

SEQ ID NO: 8951 - RNA, 19 nt, synthetic construct
  source 1..19: mol_type = other RNA
cagttctaaaacagacact

SEQ ID NO: 8952 - RNA, 19 nt, synthetic construct
  source 1..19: mol_type = other RNA
tcagttctaaaacagacac

SEQ ID NO: 8953 - RNA, 19 nt, synthetic construct
  source 1..19: mol_type = other RNA
ctcagttctaaaacagaca

SEQ ID NO: 8954 - RNA, 19 nt, synthetic construct
  source 1..19: mol_type = other RNA
gctcagttctaaaacagac

SEQ ID NO: 8955 - RNA, 19 nt, synthetic construct
  source 1..19: mol_type = other RNA
tgctcagttctaaaacaga

SEQ ID NO: 8956 - RNA, 19 nt, synthetic construct
  source 1..19: mol_type = other RNA
ctgctcagttctaaaacag

SEQ ID NO: 8957 - RNA, 19 nt, synthetic construct
  source 1..19: mol_type = other RNA
gctgctcagttctaaaaca

SEQ ID NO: 8958 - RNA, 19 nt, synthetic construct
  source 1..19: mol_type = other RNA
tgctgctcagttctaaaac

SEQ ID NO: 8959 - RNA, 19 nt, synthetic construct
  source 1..19: mol_type = other RNA
gtgctgctcagttctaaaa

SEQ ID NO: 8960 - RNA, 19 nt, synthetic construct
  source 1..19: mol_type = other RNA
agtgctgctcagttctaaa

SEQ ID NO: 8961 - RNA, 19 nt, synthetic construct
  source 1..19: mol_type = other RNA
aagtgctgctcagttctaa

SEQ ID NO: 8962 - RNA, 19 nt, synthetic construct
  source 1..19: mol_type = other RNA
aaagtgctgctcagttcta

SEQ ID NO: 8963 - RNA, 19 nt, synthetic construct
  source 1..19: mol_type = other RNA
aaaagtgctgctcagttct

SEQ ID NO: 8964 - RNA, 19 nt, synthetic construct
  source 1..19: mol_type = other RNA
gaaaagtgctgctcagttc

SEQ ID NO: 8965 - RNA, 19 nt, synthetic construct
  source 1..19: mol_type = other RNA
agaaaagtgctgctcagtt

SEQ ID NO: 8966 - RNA, 19 nt, synthetic construct
  source 1..19: mol_type = other RNA
tagaaaagtgctgctcagt

SEQ ID NO: 8967 - RNA, 19 nt, synthetic construct
  source 1..19: mol_type = other RNA
gtagaaaagtgctgctcag

SEQ ID NO: 8968 - RNA, 19 nt, synthetic construct
  source 1..19: mol_type = other RNA
ggtagaaaagtgctgctca

SEQ ID NO: 8969 - RNA, 19 nt, synthetic construct
  source 1..19: mol_type = other RNA
aggtagaaaagtgctgctc

SEQ ID NO: 8970 - RNA, 19 nt, synthetic construct
  source 1..19: mol_type = other RNA
gaggtagaaaagtgctgct

SEQ ID NO: 8971 - RNA, 19 nt, synthetic construct
  source 1..19: mol_type = other RNA
tgaggtagaaaagtgctgc

SEQ ID NO: 8972 - RNA, 19 nt, synthetic construct
  source 1..19: mol_type = other RNA
ttgaggtagaaaagtgctg

SEQ ID NO: 8973 - RNA, 19 nt, synthetic construct
  source 1..19: mol_type = other RNA
attgaggtagaaaagtgct

SEQ ID NO: 8974 - RNA, 19 nt, synthetic construct
  source 1..19: mol_type = other RNA
cattgaggtagaaaagtgc

SEQ ID NO: 8975 - RNA, 19 nt, synthetic construct
  source 1..19: mol_type = other RNA
gcattgaggtagaaaagtg

SEQ ID NO: 8976 - RNA, 19 nt, synthetic construct
  source 1..19: mol_type = other RNA
tgcattgaggtagaaaagt

SEQ ID NO: 8977 - RNA, 19 nt, synthetic construct
  source 1..19: mol_type = other RNA
ttgcattgaggtagaaaag

SEQ ID NO: 8978 - RNA, 19 nt, synthetic construct
  source 1..19: mol_type = other RNA
gttgcattgaggtagaaaa

SEQ ID NO: 8979 - RNA, 19 nt, synthetic construct
  source 1..19: mol_type = other RNA
ggttgcattgaggtagaaa

SEQ ID NO: 8980 - RNA, 19 nt, synthetic construct
  source 1..19: mol_type = other RNA
cggttgcattgaggtagaa

SEQ ID NO: 8981 - RNA, 19 nt, synthetic construct
  source 1..19: mol_type = other RNA
tcggttgcattgaggtaga

SEQ ID NO: 8982 - RNA, 19 nt, synthetic construct
  source 1..19: mol_type = other RNA
gtcggttgcattgaggtag

SEQ ID NO: 8983 - RNA, 19 nt, synthetic construct
  source 1..19: mol_type = other RNA
tgtcggttgcattgaggta

SEQ ID NO: 8984 - RNA, 19 nt, synthetic construct
  source 1..19: mol_type = other RNA
ttgtcggttgcattgaggt

SEQ ID NO: 8985 - RNA, 19 nt, synthetic construct
  source 1..19: mol_type = other RNA
tttgtcggttgcattgagg

SEQ ID NO: 8986 - RNA, 19 nt, synthetic construct
  source 1..19: mol_type = other RNA
ttttgtcggttgcattgag

SEQ ID NO: 8987 - RNA, 19 nt, synthetic construct
  source 1..19: mol_type = other RNA
tttttgtcggttgcattga

SEQ ID NO: 8988 - RNA, 19 nt, synthetic construct
  source 1..19: mol_type = other RNA
gtttttgtcggttgcattg

SEQ ID NO: 8989 - RNA, 19 nt, synthetic construct
  source 1..19: mol_type = other RNA
agtttttgtcggttgcatt

SEQ ID NO: 8990 - RNA, 19 nt, synthetic construct
  source 1..19: mol_type = other RNA
aagtttttgtcggttgcat

SEQ ID NO: 8991 - RNA, 19 nt, synthetic construct
  source 1..19: mol_type = other RNA
gaagtttttgtcggttgca

SEQ ID NO: 8992 - RNA, 19 nt, synthetic construct
  source 1..19: mol_type = other RNA
agaagtttttgtcggttgc

SEQ ID NO: 8993 - RNA, 19 nt, synthetic construct
  source 1..19: mol_type = other RNA
tagaagtttttgtcggttg

SEQ ID NO: 8994 - RNA, 19 nt, synthetic construct
  source 1..19: mol_type = other RNA
ctagaagtttttgtcggtt

SEQ ID NO: 8995 - RNA, 19 nt, synthetic construct
  source 1..19: mol_type = other RNA
tctagaagtttttgtcggt

SEQ ID NO: 8996 - RNA, 19 nt, synthetic construct
  source 1..19: mol_type = other RNA
ttctagaagtttttgtcgg

SEQ ID NO: 8997 - RNA, 19 nt, synthetic construct
  source 1..19: mol_type = other RNA
attctagaagtttttgtcg

SEQ ID NO: 8998 - RNA, 19 nt, synthetic construct
  source 1..19: mol_type = other RNA
tattctagaagtttttgtc

SEQ ID NO: 8999 - RNA, 19 nt, synthetic construct
  source 1..19: mol_type = other RNA
atattctagaagtttttgt

SEQ ID NO: 9000 - RNA, 19 nt, synthetic construct
  source 1..19: mol_type = other RNA
tatattctagaagtttttg

SEQ ID NO: 9001 - RNA, 19 nt, synthetic construct
  source 1..19: mol_type = other RNA
atatattctagaagttttt

SEQ ID NO: 9002 - RNA, 19 nt, synthetic construct
  source 1..19: mol_type = other RNA
aatatattctagaagtttt

SEQ ID NO: 9003 - RNA, 19 nt, synthetic construct
  source 1..19: mol_type = other RNA
gaatatattctagaagttt

SEQ ID NO: 9004 - RNA, 19 nt, synthetic construct
  source 1..19: mol_type = other RNA
agaatatattctagaagtt

SEQ ID NO: 9005 - RNA, 19 nt, synthetic construct
  source 1..19: mol_type = other RNA
cagaatatattctagaagt

SEQ ID NO: 9006 - RNA, 19 nt, synthetic construct
  source 1..19: mol_type = other RNA
tcagaatatattctagaag

SEQ ID NO: 9007 - RNA, 19 nt, synthetic construct
  source 1..19: mol_type = other RNA
ctcagaatatattctagaa

SEQ ID NO: 9008 - RNA, 19 nt, synthetic construct
  source 1..19: mol_type = other RNA
actcagaatatattctaga

SEQ ID NO: 9009 - RNA, 19 nt, synthetic construct
  source 1..19: mol_type = other RNA
aactcagaatatattctag

SEQ ID NO: 9010 - RNA, 19 nt, synthetic construct
  source 1..19: mol_type = other RNA
aaactcagaatatattcta

SEQ ID NO: 9011 - RNA, 19 nt, synthetic construct
  source 1..19: mol_type = other RNA
aaaactcagaatatattct

SEQ ID NO: 9012 - RNA, 19 nt, synthetic construct
  source 1..19: mol_type = other RNA
caaaactcagaatatattc

SEQ ID NO: 9013 - RNA, 19 nt, synthetic construct
  source 1..19: mol_type = other RNA
acaaaactcagaatatatt

SEQ ID NO: 9014 - RNA, 19 nt, synthetic construct
  source 1..19: mol_type = other RNA
cacaaaactcagaatatat

SEQ ID NO: 9015 - RNA, 19 nt, synthetic construct
  source 1..19: mol_type = other RNA
ccacaaaactcagaatata

SEQ ID NO: 9016 - RNA, 19 nt, synthetic construct
  source 1..19: mol_type = other RNA
accacaaaactcagaatat

SEQ ID NO: 9017 - RNA, 19 nt, synthetic construct
  source 1..19: mol_type = other RNA
caccacaaaactcagaata

SEQ ID NO: 9018 - RNA, 19 nt, synthetic construct
  source 1..19: mol_type = other RNA
gcaccacaaaactcagaat

SEQ ID NO: 9019 - RNA, 19 nt, synthetic construct
  source 1..19: mol_type = other RNA
agcaccacaaaactcagaa

SEQ ID NO: 9020 - RNA, 19 nt, synthetic construct
  source 1..19: mol_type = other RNA
cagcaccacaaaactcaga

SEQ ID NO: 9021 - RNA, 19 nt, synthetic construct
  source 1..19: mol_type = other RNA
acagcaccacaaaactcag

SEQ ID NO: 9022 - RNA, 19 nt, synthetic construct
  source 1..19: mol_type = other RNA
tacagcaccacaaaactca

SEQ ID NO: 9023 - RNA, 19 nt, synthetic construct
  source 1..19: mol_type = other RNA
ctacagcaccacaaaactc

SEQ ID NO: 9024 - RNA, 19 nt, synthetic construct
  source 1..19: mol_type = other RNA
cctacagcaccacaaaact

SEQ ID NO: 9025 - RNA, 19 nt, synthetic construct
  source 1..19: mol_type = other RNA
acctacagcaccacaaaac

SEQ ID NO: 9026 - RNA, 19 nt, synthetic construct
  source 1..19: mol_type = other RNA
tacctacagcaccacaaaa

SEQ ID NO: 9027 - RNA, 19 nt, synthetic construct
  source 1..19: mol_type = other RNA
ttacctacagcaccacaaa

SEQ ID NO: 9028 - RNA, 19 nt, synthetic construct
  source 1..19: mol_type = other RNA
gttacctacagcaccacaa

SEQ ID NO: 9029 - RNA, 19 nt, synthetic construct
  source 1..19: mol_type = other RNA
cgttacctacagcaccaca

SEQ ID NO: 9030 - RNA, 19 nt, synthetic construct
  source 1..19: mol_type = other RNA
acgttacctacagcaccac

SEQ ID NO: 9031 - RNA, 19 nt, synthetic construct
  source 1..19: mol_type = other RNA
cacgttacctacagcacca

SEQ ID NO: 9032 - RNA, 19 nt, synthetic construct
  source 1..19: mol_type = other RNA
acacgttacctacagcacc

SEQ ID NO: 9033 - RNA, 19 nt, synthetic construct
  source 1..19: mol_type = other RNA
cacacgttacctacagcac

SEQ ID NO: 9034 - RNA, 19 nt, synthetic construct
  source 1..19: mol_type = other RNA
ccacacgttacctacagca

SEQ ID NO: 9035 - RNA, 19 nt, synthetic construct
  source 1..19: mol_type = other RNA
gccacacgttacctacagc

SEQ ID NO: 9036 - RNA, 19 nt, synthetic construct
  source 1..19: mol_type = other RNA
tgccacacgttacctacag

SEQ ID NO: 9037 - RNA, 19 nt, synthetic construct
  source 1..19: mol_type = other RNA
gtgccacacgttacctaca

SEQ ID NO: 9038 - RNA, 19 nt, synthetic construct
  source 1..19: mol_type = other RNA
agtgccacacgttacctac

SEQ ID NO: 9039 - RNA, 19 nt, synthetic construct
  source 1..19: mol_type = other RNA
cagtgccacacgttaccta

SEQ ID NO: 9040 - RNA, 19 nt, synthetic construct
  source 1..19: mol_type = other RNA
gcagtgccacacgttacct

SEQ ID NO: 9041 - RNA, 19 nt, synthetic construct
  source 1..19: mol_type = other RNA
agcagtgccacacgttacc

SEQ ID NO: 9042 - RNA, 19 nt, synthetic construct
  source 1..19: mol_type = other RNA
cagcagtgccacacgttac

SEQ ID NO: 9043 - RNA, 19 nt, synthetic construct
  source 1..19: mol_type = other RNA
ccagcagtgccacacgtta

SEQ ID NO: 9044 - RNA, 19 nt, synthetic construct
  source 1..19: mol_type = other RNA
gccagcagtgccacacgtt

SEQ ID NO: 9045 - RNA, 19 nt, synthetic construct
  source 1..19: mol_type = other RNA
tgccagcagtgccacacgt

SEQ ID NO: 9046 - RNA, 19 nt, synthetic construct
  source 1..19: mol_type = other RNA
ttgccagcagtgccacacg

SEQ ID NO: 9047 - RNA, 19 nt, synthetic construct
  source 1..19: mol_type = other RNA
tttgccagcagtgccacac

SEQ ID NO: 9048 - RNA, 19 nt, synthetic construct
  source 1..19: mol_type = other RNA
atttgccagcagtgccaca

SEQ ID NO: 9049 - RNA, 19 nt, synthetic construct
  source 1..19: mol_type = other RNA
catttgccagcagtgccac

SEQ ID NO: 9050 - RNA, 19 nt, synthetic construct
  source 1..19: mol_type = other RNA
tcatttgccagcagtgcca

SEQ ID NO: 9051 - RNA, 19 nt, synthetic construct
  source 1..19: mol_type = other RNA
ttcatttgccagcagtgcc

SEQ ID NO: 9052 - RNA, 19 nt, synthetic construct
  source 1..19: mol_type = other RNA
cttcatttgccagcagtgc

SEQ ID NO: 9053 - RNA, 19 nt, synthetic construct
  source 1..19: mol_type = other RNA
ccttcatttgccagcagtg

SEQ ID NO: 9054 - RNA, 19 nt, synthetic construct
  source 1..19: mol_type = other RNA
accttcatttgccagcagt

SEQ ID NO: 9055 - RNA, 19 nt, synthetic construct
  source 1..19: mol_type = other RNA
gaccttcatttgccagcag

SEQ ID NO: 9056 - RNA, 19 nt, synthetic construct
  source 1..19: mol_type = other RNA
tgaccttcatttgccagca

SEQ ID NO: 9057 - RNA, 19 nt, synthetic construct
  source 1..19: mol_type = other RNA
atgaccttcatttgccagc

SEQ ID NO: 9058 - RNA, 19 nt, synthetic construct
  source 1..19: mol_type = other RNA
catgaccttcatttgccag

SEQ ID NO: 9059 - RNA, 19 nt, synthetic construct
  source 1..19: mol_type = other RNA
tcatgaccttcatttgcca

SEQ ID NO: 9060 - RNA, 19 nt, synthetic construct
  source 1..19: mol_type = other RNA
ctcatgaccttcatttgcc

SEQ ID NO: 9061 - RNA, 19 nt, synthetic construct
  source 1..19: mol_type = other RNA
tctcatgaccttcatttgc

SEQ ID NO: 9062 - RNA, 19 nt, synthetic construct
  source 1..19: mol_type = other RNA
atctcatgaccttcatttg

SEQ ID NO: 9063 - RNA, 19 nt, synthetic construct
  source 1..19: mol_type = other RNA
catctcatgaccttcattt

SEQ ID NO: 9064 - RNA, 19 nt, synthetic construct
  source 1..19: mol_type = other RNA
tcatctcatgaccttcatt

SEQ ID NO: 9065 - RNA, 19 nt, synthetic construct
  source 1..19: mol_type = other RNA
ctcatctcatgaccttcat

SEQ ID NO: 9066 - RNA, 19 nt, synthetic construct
  source 1..19: mol_type = other RNA
actcatctcatgaccttca

SEQ ID NO: 9067 - RNA, 19 nt, synthetic construct
  source 1..19: mol_type = other RNA
aactcatctcatgaccttc

SEQ ID NO: 9068 - RNA, 19 nt, synthetic construct
  source 1..19: mol_type = other RNA
gaactcatctcatgacctt

SEQ ID NO: 9069 - RNA, 19 nt, synthetic construct
  source 1..19: mol_type = other RNA
ggaactcatctcatgacct

SEQ ID NO: 9070 - RNA, 19 nt, synthetic construct
  source 1..19: mol_type = other RNA
aggaactcatctcatgacc

SEQ ID NO: 9071 - RNA, 19 nt, synthetic construct
  source 1..19: mol_type = other RNA
aaggaactcatctcatgac

SEQ ID NO: 9072 - RNA, 19 nt, synthetic construct
  source 1..19: mol_type = other RNA
caaggaactcatctcatga

SEQ ID NO: 9073 - RNA, 19 nt, synthetic construct
  source 1..19: mol_type = other RNA
acaaggaactcatctcatg

SEQ ID NO: 9074 - RNA, 19 nt, synthetic construct
  source 1..19: mol_type = other RNA
tacaaggaactcatctcat

SEQ ID NO: 9075 - RNA, 19 nt, synthetic construct
  source 1..19: mol_type = other RNA
ctacaaggaactcatctca

SEQ ID NO: 9076 - RNA, 19 nt, synthetic construct
  source 1..19: mol_type = other RNA
cctacaaggaactcatctc

SEQ ID NO: 9077 - RNA, 19 nt, synthetic construct
  source 1..19: mol_type = other RNA
acctacaaggaactcatct

SEQ ID NO: 9078 - RNA, 19 nt, synthetic construct
  source 1..19: mol_type = other RNA
tacctacaaggaactcatc

SEQ ID NO: 9079 - RNA, 19 nt, synthetic construct
  source 1..19: mol_type = other RNA
gtacctacaaggaactcat

SEQ ID NO: 9080 - RNA, 19 nt, synthetic construct
  source 1..19: mol_type = other RNA
ggtacctacaaggaactca

SEQ ID NO: 9081 - RNA, 19 nt, synthetic construct
  source 1..19: mol_type = other RNA
tggtacctacaaggaactc

SEQ ID NO: 9082 - RNA, 19 nt, synthetic construct
  source 1..19: mol_type = other RNA
ctggtacctacaaggaact

SEQ ID NO: 9083 - RNA, 19 nt, synthetic construct
  source 1..19: mol_type = other RNA
gctggtacctacaaggaac

SEQ ID NO: 9084 - RNA, 19 nt, synthetic construct
  source 1..19: mol_type = other RNA
agctggtacctacaaggaa

SEQ ID NO: 9085 - RNA, 19 nt, synthetic construct
  source 1..19: mol_type = other RNA
aagctggtacctacaagga

SEQ ID NO: 9086 - RNA, 19 nt, synthetic construct
  source 1..19: mol_type = other RNA
gaagctggtacctacaagg

SEQ ID NO: 9087 - RNA, 19 nt, synthetic construct
  source 1..19: mol_type = other RNA
agaagctggtacctacaag

SEQ ID NO: 9088 - RNA, 19 nt, synthetic construct
  source 1..19: mol_type = other RNA
cagaagctggtacctacaa

SEQ ID NO: 9089 - RNA, 19 nt, synthetic construct
  source 1..19: mol_type = other RNA
ccagaagctggtacctaca

SEQ ID NO: 9090 - RNA, 19 nt, synthetic construct
  source 1..19: mol_type = other RNA
gccagaagctggtacctac

SEQ ID NO: 9091 - RNA, 19 nt, synthetic construct
  source 1..19: mol_type = other RNA
agccagaagctggtaccta

SEQ ID NO: 9092 - RNA, 19 nt, synthetic construct
  source 1..19: mol_type = other RNA
gagccagaagctggtacct

SEQ ID NO: 9093 - RNA, 19 nt, synthetic construct
  source 1..19: mol_type = other RNA
tgagccagaagctggtacc

SEQ ID NO: 9094 - RNA, 19 nt, synthetic construct
  source 1..19: mol_type = other RNA
ttgagccagaagctggtac

SEQ ID NO: 9095 - RNA, 19 nt, synthetic construct
  source 1..19: mol_type = other RNA
cttgagccagaagctggta

SEQ ID NO: 9096 - RNA, 19 nt, synthetic construct
  source 1..19: mol_type = other RNA
tcttgagccagaagctggt

SEQ ID NO: 9097 - RNA, 19 nt, synthetic construct
  source 1..19: mol_type = other RNA
ctcttgagccagaagctgg

SEQ ID NO: 9098 - RNA, 19 nt, synthetic construct
  source 1..19: mol_type = other RNA
actcttgagccagaagctg

SEQ ID NO: 9099 - RNA, 19 nt, synthetic construct
  source 1..19: mol_type = other RNA
aactcttgagccagaagct

SEQ ID NO: 9100 - RNA, 19 nt, synthetic construct
  source 1..19: mol_type = other RNA
caactcttgagccagaagc

SEQ ID NO: 9101 - RNA, 19 nt, synthetic construct
  source 1..19: mol_type = other RNA
tcaactcttgagccagaag

SEQ ID NO: 9102 - RNA, 19 nt, synthetic construct
  source 1..19: mol_type = other RNA
ttcaactcttgagccagaa

SEQ ID NO: 9103 - RNA, 19 nt, synthetic construct
  source 1..19: mol_type = other RNA
cttcaactcttgagccaga

SEQ ID NO: 9104 - RNA, 19 nt, synthetic construct
  source 1..19: mol_type = other RNA
ccttcaactcttgagccag

SEQ ID NO: 9105 - RNA, 19 nt, synthetic construct
  source 1..19: mol_type = other RNA
accttcaactcttgagcca

SEQ ID NO: 9106 - RNA, 19 nt, synthetic construct
  source 1..19: mol_type = other RNA
caccttcaactcttgagcc

SEQ ID NO: 9107 - RNA, 19 nt, synthetic construct
  source 1..19: mol_type = other RNA
gcaccttcaactcttgagc

SEQ ID NO: 9108 - RNA, 19 nt, synthetic construct
  source 1..19: mol_type = other RNA
ggcaccttcaactcttgag

SEQ ID NO: 9109 - RNA, 19 nt, synthetic construct
  source 1..19: mol_type = other RNA
tggcaccttcaactcttga

SEQ ID NO: 9110 - RNA, 19 nt, synthetic construct
  source 1..19: mol_type = other RNA
atggcaccttcaactcttg

SEQ ID NO: 9111 - RNA, 19 nt, synthetic construct
  source 1..19: mol_type = other RNA
gatggcaccttcaactctt

SEQ ID NO: 9112 - RNA, 19 nt, synthetic construct
  source 1..19: mol_type = other RNA
cgatggcaccttcaactct

SEQ ID NO: 9113 - RNA, 19 nt, synthetic construct
  source 1..19: mol_type = other RNA
gcgatggcaccttcaactc

SEQ ID NO: 9114 - RNA, 19 nt, synthetic construct
  source 1..19: mol_type = other RNA
tgcgatggcaccttcaact

SEQ ID NO: 9115 - RNA, 19 nt, synthetic construct
  source 1..19: mol_type = other RNA
ctgcgatggcaccttcaac

SEQ ID NO: 9116 - RNA, 19 nt, synthetic construct
  source 1..19: mol_type = other RNA
cctgcgatggcaccttcaa

SEQ ID NO: 9117 - RNA, 19 nt, synthetic construct
  source 1..19: mol_type = other RNA
ccctgcgatggcaccttca

SEQ ID NO: 9118 - RNA, 19 nt, synthetic construct
  source 1..19: mol_type = other RNA
accctgcgatggcaccttc

SEQ ID NO: 9119 - RNA, 19 nt, synthetic construct
  source 1..19: mol_type = other RNA
gaccctgcgatggcacctt

SEQ ID NO: 9120 - RNA, 19 nt, synthetic construct
  source 1..19: mol_type = other RNA
tgaccctgcgatggcacct

SEQ ID NO: 9121 - RNA, 19 nt, synthetic construct
  source 1..19: mol_type = other RNA
ctgaccctgcgatggcacc

SEQ ID NO: 9122 - RNA, 19 nt, synthetic construct
  source 1..19: mol_type = other RNA
cctgaccctgcgatggcac

SEQ ID NO: 9123 - RNA, 19 nt, synthetic construct
  source 1..19: mol_type = other RNA
gcctgaccctgcgatggca

SEQ ID NO: 9124 - RNA, 19 nt, synthetic construct
  source 1..19: mol_type = other RNA
ggcctgaccctgcgatggc

SEQ ID NO: 9125 - RNA, 19 nt, synthetic construct
  source 1..19: mol_type = other RNA
aggcctgaccctgcgatgg

SEQ ID NO: 9126 - RNA, 19 nt, synthetic construct
  source 1..19: mol_type = other RNA
caggcctgaccctgcgatg

SEQ ID NO: 9127 - RNA, 19 nt, synthetic construct
  source 1..19: mol_type = other RNA
gcaggcctgaccctgcgat

SEQ ID NO: 9128 - RNA, 19 nt, synthetic construct
  source 1..19: mol_type = other RNA
ggcaggcctgaccctgcga

SEQ ID NO: 9129 - RNA, 19 nt, synthetic construct
  source 1..19: mol_type = other RNA
gggcaggcctgaccctgcg

SEQ ID NO: 9130 - RNA, 19 nt, synthetic construct
  source 1..19: mol_type = other RNA
agggcaggcctgaccctgc

SEQ ID NO: 9131 - RNA, 19 nt, synthetic construct
  source 1..19: mol_type = other RNA
cagggcaggcctgaccctg

SEQ ID NO: 9132 - RNA, 19 nt, synthetic construct
  source 1..19: mol_type = other RNA
acagggcaggcctgaccct

SEQ ID NO: 9133 - RNA, 19 nt, synthetic construct
  source 1..19: mol_type = other RNA
gacagggcaggcctgaccc

SEQ ID NO: 9134 - RNA, 19 nt, synthetic construct
  source 1..19: mol_type = other RNA
ggacagggcaggcctgacc

SEQ ID NO: 9135 - RNA, 19 nt, synthetic construct
  source 1..19: mol_type = other RNA
gggacagggcaggcctgac

SEQ ID NO: 9136 - RNA, 19 nt, synthetic construct
  source 1..19: mol_type = other RNA
cgggacagggcaggcctga

SEQ ID NO: 9137 - RNA, 19 nt, synthetic construct
  source 1..19: mol_type = other RNA
tcgggacagggcaggcctg

SEQ ID NO: 9138 - RNA, 19 nt, synthetic construct
  source 1..19: mol_type = other RNA
ttcgggacagggcaggcct

SEQ ID NO: 9139 - RNA, 19 nt, synthetic construct
  source 1..19: mol_type = other RNA
cttcgggacagggcaggcc

SEQ ID NO: 9140 - RNA, 19 nt, synthetic construct
  source 1..19: mol_type = other RNA
acttcgggacagggcaggc

SEQ ID NO: 9141 - RNA, 19 nt, synthetic construct
  source 1..19: mol_type = other RNA
cacttcgggacagggcagg

SEQ ID NO: 9142 - RNA, 19 nt, synthetic construct
  source 1..19: mol_type = other RNA
tcacttcgggacagggcag

SEQ ID NO: 9143 - RNA, 19 nt, synthetic construct
  source 1..19: mol_type = other RNA
atcacttcgggacagggca

SEQ ID NO: 9144 - RNA, 19 nt, synthetic construct
  source 1..19: mol_type = other RNA
gatcacttcgggacagggc

SEQ ID NO: 9145 - RNA, 19 nt, synthetic construct
  source 1..19: mol_type = other RNA
agatcacttcgggacaggg

SEQ ID NO: 9146 - RNA, 19 nt, synthetic construct
  source 1..19: mol_type = other RNA
gagatcacttcgggacagg

SEQ ID NO: 9147 - RNA, 19 nt, synthetic construct
  source 1..19: mol_type = other RNA
ggagatcacttcgggacag

SEQ ID NO: 9148 - RNA, 19 nt, synthetic construct
  source 1..19: mol_type = other RNA
aggagatcacttcgggaca

SEQ ID NO: 9149 - RNA, 19 nt, synthetic construct
  source 1..19: mol_type = other RNA
caggagatcacttcgggac

SEQ ID NO: 9150 - RNA, 19 nt, synthetic construct
  source 1..19: mol_type = other RNA
ccaggagatcacttcggga

SEQ ID NO: 9151 - RNA, 19 nt, synthetic construct
  source 1..19: mol_type = other RNA
tccaggagatcacttcggg

SEQ ID NO: 9152 - RNA, 19 nt, synthetic construct
  source 1..19: mol_type = other RNA
ttccaggagatcacttcgg

SEQ ID NO: 9153 - RNA, 19 nt, synthetic construct
  source 1..19: mol_type = other RNA
cttccaggagatcacttcg

SEQ ID NO: 9154 - RNA, 19 nt, synthetic construct
  source 1..19: mol_type = other RNA
tcttccaggagatcacttc

SEQ ID NO: 9155 - RNA, 19 nt, synthetic construct
  source 1..19: mol_type = other RNA
gtcttccaggagatcactt

SEQ ID NO: 9156 - RNA, 19 nt, synthetic construct
  source 1..19: mol_type = other RNA
tgtcttccaggagatcact

SEQ ID NO: 9157 - RNA, 19 nt, synthetic construct
  source 1..19: mol_type = other RNA
ttgtcttccaggagatcac

SEQ ID NO: 9158 - RNA, 19 nt, synthetic construct
  source 1..19: mol_type = other RNA
cttgtcttccaggagatca

SEQ ID NO: 9159 - RNA, 19 nt, synthetic construct
  source 1..19: mol_type = other RNA
acttgtcttccaggagatc

SEQ ID NO: 9160 - RNA, 19 nt, synthetic construct
  source 1..19: mol_type = other RNA
cacttgtcttccaggagat

SEQ ID NO: 9161 - RNA, 19 nt, synthetic construct
  source 1..19: mol_type = other RNA
gcacttgtcttccaggaga

SEQ ID NO: 9162 - RNA, 19 nt, synthetic construct
  source 1..19: mol_type = other RNA
ggcacttgtcttccaggag

SEQ ID NO: 9163 - RNA, 19 nt, synthetic construct
  source 1..19: mol_type = other RNA
aggcacttgtcttccagga

SEQ ID NO: 9164 - RNA, 19 nt, synthetic construct
  source 1..19: mol_type = other RNA
aaggcacttgtcttccagg

SEQ ID NO: 9165 - RNA, 19 nt, synthetic construct
  source 1..19: mol_type = other RNA
gaaggcacttgtcttccag

SEQ ID NO: 9166 - RNA, 19 nt, synthetic construct
  source 1..19: mol_type = other RNA
agaaggcacttgtcttcca

SEQ ID NO: 9167 - RNA, 19 nt, synthetic construct
  source 1..19: mol_type = other RNA
gagaaggcacttgtcttcc

SEQ ID NO: 9168 - RNA, 19 nt, synthetic construct
  source 1..19: mol_type = other RNA
ggagaaggcacttgtcttc

SEQ ID NO: 9169 - RNA, 19 nt, synthetic construct
  source 1..19: mol_type = other RNA
gggagaaggcacttgtctt

SEQ ID NO: 9170 - RNA, 19 nt, synthetic construct
  source 1..19: mol_type = other RNA
agggagaaggcacttgtct

SEQ ID NO: 9171 - RNA, 19 nt, synthetic construct
  source 1..19: mol_type = other RNA
gagggagaaggcacttgtc

SEQ ID NO: 9172 - RNA, 19 nt, synthetic construct
  source 1..19: mol_type = other RNA
ggagggagaaggcacttgt

SEQ ID NO: 9173 - RNA, 19 nt, synthetic construct
  source 1..19: mol_type = other RNA
tggagggagaaggcacttg

SEQ ID NO: 9174 - RNA, 19 nt, synthetic construct
  source 1..19: mol_type = other RNA
atggagggagaaggcactt

SEQ ID NO: 9175 - RNA, 19 nt, synthetic construct
  source 1..19: mol_type = other RNA
catggagggagaaggcact

SEQ ID NO: 9176 - RNA, 19 nt, synthetic construct
  source 1..19: mol_type = other RNA
ccatggagggagaaggcac

SEQ ID NO: 9177 - RNA, 19 nt, synthetic construct
  source 1..19: mol_type = other RNA
tccatggagggagaaggca

SEQ ID NO: 9178 - RNA, 19 nt, synthetic construct
  source 1..19: mol_type = other RNA
atccatggagggagaaggc

SEQ ID NO: 9179 - RNA, 19 nt, synthetic construct
  source 1..19: mol_type = other RNA
gatccatggagggagaagg

SEQ ID NO: 9180 - RNA, 19 nt, synthetic construct
  source 1..19: mol_type = other RNA
agatccatggagggagaag

SEQ ID NO: 9181 - RNA, 19 nt, synthetic construct
  source 1..19: mol_type = other RNA
cagatccatggagggagaa

SEQ ID NO: 9182 - RNA, 19 nt, synthetic construct
  source 1..19: mol_type = other RNA
acagatccatggagggaga

SEQ ID NO: 9183 - RNA, 19 nt, synthetic construct
  source 1..19: mol_type = other RNA
cacagatccatggagggag

SEQ ID NO: 9184 - RNA, 19 nt, synthetic construct
  source 1..19: mol_type = other RNA
tcacagatccatggaggga

SEQ ID NO: 9185 - RNA, 19 nt, synthetic construct
  source 1..19: mol_type = other RNA
atcacagatccatggaggg

SEQ ID NO: 9186 - RNA, 19 nt, synthetic construct
  source 1..19: mol_type = other RNA
gatcacagatccatggagg

SEQ ID NO: 9187 - RNA, 19 nt, synthetic construct
  source 1..19: mol_type = other RNA
agatcacagatccatggag

SEQ ID NO: 9188 - RNA, 19 nt, synthetic construct
  source 1..19: mol_type = other RNA
aagatcacagatccatgga

SEQ ID NO: 9189 - RNA, 19 nt, synthetic construct
  source 1..19: mol_type = other RNA
gaagatcacagatccatgg

SEQ ID NO: 9190 - RNA, 19 nt, synthetic construct
  source 1..19: mol_type = other RNA
ggaagatcacagatccatg

SEQ ID NO: 9191 - RNA, 19 nt, synthetic construct
  source 1..19: mol_type = other RNA
gggaagatcacagatccat

SEQ ID NO: 9192 - RNA, 19 nt, synthetic construct
  source 1..19: mol_type = other RNA
tgggaagatcacagatcca

SEQ ID NO: 9193 - RNA, 19 nt, synthetic construct
  source 1..19: mol_type = other RNA
ctgggaagatcacagatcc

SEQ ID NO: 9194 - RNA, 19 nt, synthetic construct
  source 1..19: mol_type = other RNA
gctgggaagatcacagatc

SEQ ID NO: 9195 - RNA, 19 nt, synthetic construct
  source 1..19: mol_type = other RNA
agctgggaagatcacagat

SEQ ID NO: 9196 - RNA, 19 nt, synthetic construct
  source 1..19: mol_type = other RNA
gagctgggaagatcacaga

SEQ ID NO: 9197 - RNA, 19 nt, synthetic construct
  source 1..19: mol_type = other RNA
agagctgggaagatcacag

SEQ ID NO: 9198 - RNA, 19 nt, synthetic construct
  source 1..19: mol_type = other RNA
cagagctgggaagatcaca

SEQ ID NO: 9199 - RNA, 19 nt, synthetic construct
  source 1..19: mol_type = other RNA
gcagagctgggaagatcac

SEQ ID NO: 9200 - RNA, 19 nt, synthetic construct
  source 1..19: mol_type = other RNA
tgcagagctgggaagatca

SEQ ID NO: 9201 - RNA, 19 nt, synthetic construct
  source 1..19: mol_type = other RNA
atgcagagctgggaagatc

SEQ ID NO: 9202 - RNA, 19 nt, synthetic construct
  source 1..19: mol_type = other RNA
gatgcagagctgggaagat

SEQ ID NO: 9203 - RNA, 19 nt, synthetic construct
  source 1..19: mol_type = other RNA
tgatgcagagctgggaaga

SEQ ID NO: 9204 - RNA, 19 nt, synthetic construct
  source 1..19: mol_type = other RNA
ttgatgcagagctgggaag

SEQ ID NO: 9205 - RNA, 19 nt, synthetic construct
  source 1..19: mol_type = other RNA
gttgatgcagagctgggaa

SEQ ID NO: 9206 - RNA, 19 nt, synthetic construct
  source 1..19: mol_type = other RNA
tgttgatgcagagctggga

SEQ ID NO: 9207 - RNA, 19 nt, synthetic construct
  source 1..19: mol_type = other RNA
gtgttgatgcagagctggg

SEQ ID NO: 9208 - RNA, 19 nt, synthetic construct
  source 1..19: mol_type = other RNA
tgtgttgatgcagagctgg

SEQ ID NO: 9209 - RNA, 19 nt, synthetic construct
  source 1..19: mol_type = other RNA
ctgtgttgatgcagagctg

SEQ ID NO: 9210 - RNA, 19 nt, synthetic construct
  source 1..19: mol_type = other RNA
gctgtgttgatgcagagct

SEQ ID NO: 9211 - RNA, 19 nt, synthetic construct
  source 1..19: mol_type = other RNA
tgctgtgttgatgcagagc

SEQ ID NO: 9212 - RNA, 19 nt, synthetic construct
  source 1..19: mol_type = other RNA
ctgctgtgttgatgcagag

SEQ ID NO: 9213 - RNA, 19 nt, synthetic construct
  source 1..19: mol_type = other RNA
gctgctgtgttgatgcaga

SEQ ID NO: 9214 - RNA, 19 nt, synthetic construct
  source 1..19: mol_type = other RNA
ggctgctgtgttgatgcag

SEQ ID NO: 9215 - RNA, 19 nt, synthetic construct
  source 1..19: mol_type = other RNA
aggctgctgtgttgatgca

SEQ ID NO: 9216 - RNA, 19 nt, synthetic construct
  source 1..19: mol_type = other RNA
caggctgctgtgttgatgc

SEQ ID NO: 9217 - RNA, 19 nt, synthetic construct
  source 1..19: mol_type = other RNA
gcaggctgctgtgttgatg

SEQ ID NO: 9218 - RNA, 19 nt, synthetic construct
  source 1..19: mol_type = other RNA
tgcaggctgctgtgttgat

SEQ ID NO: 9219 - RNA, 19 nt, synthetic construct
  source 1..19: mol_type = other RNA
ctgcaggctgctgtgttga

SEQ ID NO: 9220 - RNA, 19 nt, synthetic construct
  source 1..19: mol_type = other RNA
tctgcaggctgctgtgttg

SEQ ID NO: 9221 - RNA, 19 nt, synthetic construct
  source 1..19: mol_type = other RNA
atctgcaggctgctgtgtt

SEQ ID NO: 9222 - RNA, 19 nt, synthetic construct
  source 1..19: mol_type = other RNA
tatctgcaggctgctgtgt

SEQ ID NO: 9223 - RNA, 19 nt, synthetic construct
  source 1..19: mol_type = other RNA
ttatctgcaggctgctgtg

SEQ ID NO: 9224 - RNA, 19 nt, synthetic construct
  source 1..19: mol_type = other RNA
gttatctgcaggctgctgt

SEQ ID NO: 9225 - RNA, 19 nt, synthetic construct
  source 1..19: mol_type = other RNA
tgttatctgcaggctgctg

SEQ ID NO: 9226 - RNA, 19 nt, synthetic construct
  source 1..19: mol_type = other RNA
gtgttatctgcaggctgct

SEQ ID NO: 9227 - RNA, 19 nt, synthetic construct
  source 1..19: mol_type = other RNA
agtgttatctgcaggctgc

SEQ ID NO: 9228 - RNA, 19 nt, synthetic construct
  source 1..19: mol_type = other RNA
aagtgttatctgcaggctg

SEQ ID NO: 9229 - RNA, 19 nt, synthetic construct
  source 1..19: mol_type = other RNA
caagtgttatctgcaggct

SEQ ID NO: 9230 - RNA, 19 nt, synthetic construct
  source 1..19: mol_type = other RNA
ccaagtgttatctgcaggc

SEQ ID NO: 9231 - RNA, 19 nt, synthetic construct
  source 1..19: mol_type = other RNA
cccaagtgttatctgcagg

SEQ ID NO: 9232 - RNA, 19 nt, synthetic construct
  source 1..19: mol_type = other RNA
ccccaagtgttatctgcag

SEQ ID NO: 9233 - RNA, 19 nt, synthetic construct
  source 1..19: mol_type = other RNA
cccccaagtgttatctgca

SEQ ID NO: 9234 - RNA, 19 nt, synthetic construct
  source 1..19: mol_type = other RNA
ccccccaagtgttatctgc

SEQ ID NO: 9235 - RNA, 19 nt, synthetic construct
  source 1..19: mol_type = other RNA
tccccccaagtgttatctg

SEQ ID NO: 9236 - RNA, 19 nt, synthetic construct
  source 1..19: mol_type = other RNA
gtccccccaagtgttatct

SEQ ID NO: 9237 - RNA, 19 nt, synthetic construct
  source 1..19: mol_type = other RNA
ggtccccccaagtgttatc

SEQ ID NO: 9238 - RNA, 19 nt, synthetic construct
  source 1..19: mol_type = other RNA
aggtccccccaagtgttat

SEQ ID NO: 9239 - RNA, 19 nt, synthetic construct
  source 1..19: mol_type = other RNA
gaggtccccccaagtgtta

SEQ ID NO: 9240 - RNA, 19 nt, synthetic construct
  source 1..19: mol_type = other RNA
tgaggtccccccaagtgtt

SEQ ID NO: 9241 - RNA, 19 nt, synthetic construct
  source 1..19: mol_type = other RNA
ctgaggtccccccaagtgt

SEQ ID NO: 9242 - RNA, 19 nt, synthetic construct
  source 1..19: mol_type = other RNA
gctgaggtccccccaagtg

SEQ ID NO: 9243 - RNA, 19 nt, synthetic construct
  source 1..19: mol_type = other RNA
ggctgaggtccccccaagt

SEQ ID NO: 9244 - RNA, 19 nt, synthetic construct
  source 1..19: mol_type = other RNA
aggctgaggtccccccaag

SEQ ID NO: 9245 - RNA, 19 nt, synthetic construct
  source 1..19: mol_type = other RNA
gaggctgaggtccccccaa

SEQ ID NO: 9246 - RNA, 19 nt, synthetic construct
  source 1..19: mol_type = other RNA
agaggctgaggtcccccca

SEQ ID NO: 9247 - RNA, 19 nt, synthetic construct
  source 1..19: mol_type = other RNA
tagaggctgaggtcccccc

SEQ ID NO: 9248 - RNA, 19 nt, synthetic construct
  source 1..19: mol_type = other RNA
atagaggctgaggtccccc

SEQ ID NO: 9249 - RNA, 19 nt, synthetic construct
  source 1..19: mol_type = other RNA
aatagaggctgaggtcccc

SEQ ID NO: 9250 - RNA, 19 nt, synthetic construct
  source 1..19: mol_type = other RNA
gaatagaggctgaggtccc

SEQ ID NO: 9251 - RNA, 19 nt, synthetic construct
  source 1..19: mol_type = other RNA
cgaatagaggctgaggtcc

SEQ ID NO: 9252 - RNA, 19 nt, synthetic construct
  source 1..19: mol_type = other RNA
gcgaatagaggctgaggtc

SEQ ID NO: 9253 - RNA, 19 nt, synthetic construct
  source 1..19: mol_type = other RNA
tgcgaatagaggctgaggt

SEQ ID NO: 9254 - RNA, 19 nt, synthetic construct
  source 1..19: mol_type = other RNA
ttgcgaatagaggctgagg

SEQ ID NO: 9255 - RNA, 19 nt, synthetic construct
  source 1..19: mol_type = other RNA
gttgcgaatagaggctgag

SEQ ID NO: 9256 - RNA, 19 nt, synthetic construct
  source 1..19: mol_type = other RNA
agttgcgaatagaggctga

SEQ ID NO: 9257 - RNA, 19 nt, synthetic construct
  source 1..19: mol_type = other RNA
gagttgcgaatagaggctg

SEQ ID NO: 9258 - RNA, 19 nt, synthetic construct
  source 1..19: mol_type = other RNA
tgagttgcgaatagaggct

SEQ ID NO: 9259 - RNA, 19 nt, synthetic construct
  source 1..19: mol_type = other RNA
atgagttgcgaatagaggc

SEQ ID NO: 9260 - RNA, 19 nt, synthetic construct
  source 1..19: mol_type = other RNA
tatgagttgcgaatagagg

SEQ ID NO: 9261 - RNA, 19 nt, synthetic construct
  source 1..19: mol_type = other RNA
ttatgagttgcgaatagag

SEQ ID NO: 9262 - RNA, 19 nt, synthetic construct
  source 1..19: mol_type = other RNA
attatgagttgcgaataga

SEQ ID NO: 9263 - RNA, 19 nt, synthetic construct
  source 1..19: mol_type = other RNA
gattatgagttgcgaatag

SEQ ID NO: 9264 - RNA, 19 nt, synthetic construct
  source 1..19: mol_type = other RNA
ggattatgagttgcgaata

SEQ ID NO: 9265 - RNA, 19 nt, synthetic construct
  source 1..19: mol_type = other RNA
cggattatgagttgcgaat

SEQ ID NO: 9266 - RNA, 19 nt, synthetic construct
  source 1..19: mol_type = other RNA
acggattatgagttgcgaa

SEQ ID NO: 9267 - RNA, 19 nt, synthetic construct
  source 1..19: mol_type = other RNA
tacggattatgagttgcga

SEQ ID NO: 9268 - RNA, 19 nt, synthetic construct
  source 1..19: mol_type = other RNA
ctacggattatgagttgcg

SEQ ID NO: 9269 - RNA, 19 nt, synthetic construct
  source 1..19: mol_type = other RNA
tctacggattatgagttgc

SEQ ID NO: 9270 - RNA, 19 nt, synthetic construct
  source 1..19: mol_type = other RNA
gtctacggattatgagttg

SEQ ID NO: 9271 - RNA, 19 nt, synthetic construct
  source 1..19: mol_type = other RNA
agtctacggattatgagtt

SEQ ID NO: 9272 - RNA, 19 nt, synthetic construct
  source 1..19: mol_type = other RNA
tagtctacggattatgagt

SEQ ID NO: 9273 - RNA, 19 nt, synthetic construct
  source 1..19: mol_type = other RNA
gtagtctacggattatgag

SEQ ID NO: 9274 - RNA, 19 nt, synthetic construct
  source 1..19: mol_type = other RNA
tgtagtctacggattatga

SEQ ID NO: 9275 - RNA, 19 nt, synthetic construct
  source 1..19: mol_type = other RNA
ttgtagtctacggattatg

SEQ ID NO: 9276 - RNA, 19 nt, synthetic construct
  source 1..19: mol_type = other RNA
cttgtagtctacggattat

SEQ ID NO: 9277 - RNA, 19 nt, synthetic construct
  source 1..19: mol_type = other RNA
tcttgtagtctacggatta

SEQ ID NO: 9278 - RNA, 19 nt, synthetic construct
  source 1..19: mol_type = other RNA
atcttgtagtctacggatt

SEQ ID NO: 9279 - RNA, 19 nt, synthetic construct
  source 1..19: mol_type = other RNA
catcttgtagtctacggat

SEQ ID NO: 9280 - RNA, 19 nt, synthetic construct
  source 1..19: mol_type = other RNA
tcatcttgtagtctacgga

SEQ ID NO: 9281 - RNA, 19 nt, synthetic construct
  source 1..19: mol_type = other RNA
ttcatcttgtagtctacgg

SEQ ID NO: 9282 - RNA, 19 nt, synthetic construct
  source 1..19: mol_type = other RNA
tttcatcttgtagtctacg

SEQ ID NO: 9283 - RNA, 19 nt, synthetic construct
  source 1..19: mol_type = other RNA
atttcatcttgtagtctac

SEQ ID NO: 9284 - RNA, 19 nt, synthetic construct
  source 1..19: mol_type = other RNA
gatttcatcttgtagtcta

SEQ ID NO: 9285 - RNA, 19 nt, synthetic construct
  source 1..19: mol_type = other RNA
agatttcatcttgtagtct

SEQ ID NO: 9286 - RNA, 19 nt, synthetic construct
  source 1..19: mol_type = other RNA
gagatttcatcttgtagtc

SEQ ID NO: 9287 - RNA, 19 nt, synthetic construct
  source 1..19: mol_type = other RNA
tgagatttcatcttgtagt

SEQ ID NO: 9288 - RNA, 19 nt, synthetic construct
  source 1..19: mol_type = other RNA
ttgagatttcatcttgtag

SEQ ID NO: 9289 - RNA, 19 nt, synthetic construct
  source 1..19: mol_type = other RNA
attgagatttcatcttgta

SEQ ID NO: 9290 - RNA, 19 nt, synthetic construct
  source 1..19: mol_type = other RNA
tattgagatttcatcttgt

SEQ ID NO: 9291 - RNA, 19 nt, synthetic construct
  source 1..19: mol_type = other RNA
ttattgagatttcatcttg

SEQ ID NO: 9292 - RNA, 19 nt, synthetic construct
  source 1..19: mol_type = other RNA
tttattgagatttcatctt

SEQ ID NO: 9293 - RNA, 19 nt, synthetic construct
  source 1..19: mol_type = other RNA
atttattgagatttcatct

SEQ ID NO: 9294 - RNA, 19 nt, synthetic construct
  source 1..19: mol_type = other RNA
aatttattgagatttcatc

SEQ ID NO: 9295 - RNA, 19 nt, synthetic construct
  source 1..19: mol_type = other RNA
taatttattgagatttcat

SEQ ID NO: 9296 - RNA, 19 nt, synthetic construct
  source 1..19: mol_type = other RNA
ataatttattgagatttca

SEQ ID NO: 9297 - RNA, 19 nt, synthetic construct
  source 1..19: mol_type = other RNA
aataatttattgagatttc

SEQ ID NO: 9298 - RNA, 19 nt, synthetic construct
  source 1..19: mol_type = other RNA
aaataatttattgagattt

SEQ ID NO: 9299 - RNA, 19 nt, synthetic construct
  source 1..19: mol_type = other RNA
aaaataatttattgagatt

SEQ ID NO: 9300 - RNA, 19 nt, synthetic construct
  source 1..19: mol_type = other RNA
aaaaataatttattgagat

SEQ ID NO: 9301 - RNA, 19 nt, synthetic construct
  source 1..19: mol_type = other RNA
caaaaataatttattgaga

SEQ ID NO: 9302 - RNA, 19 nt, synthetic construct
  source 1..19: mol_type = other RNA
tcaaaaataatttattgag

SEQ ID NO: 9303 - RNA, 19 nt, synthetic construct
  source 1..19: mol_type = other RNA
ctcaaaaataatttattga

SEQ ID NO: 9304 - RNA, 19 nt, synthetic construct
  source 1..19: mol_type = other RNA
actcaaaaataatttattg

SEQ ID NO: 9305 - RNA, 19 nt, synthetic construct
  source 1..19: mol_type = other RNA
aactcaaaaataatttatt

SEQ ID NO: 9306 - RNA, 19 nt, synthetic construct
  source 1..19: mol_type = other RNA
aaactcaaaaataatttat

SEQ ID NO: 9307 - RNA, 19 nt, synthetic construct
  source 1..19: mol_type = other RNA
taaactcaaaaataattta

SEQ ID NO: 9308 - RNA, 19 nt, synthetic construct
  source 1..19: mol_type = other RNA
ataaactcaaaaataattt

SEQ ID NO: 9309 - RNA, 19 nt, synthetic construct
  source 1..19: mol_type = other RNA
aataaactcaaaaataatt

SEQ ID NO: 9310 - RNA, 19 nt, synthetic construct
  source 1..19: mol_type = other RNA
taataaactcaaaaataat

SEQ ID NO: 9311 - RNA, 19 nt, synthetic construct
  source 1..19: mol_type = other RNA
ttaataaactcaaaaataa

SEQ ID NO: 9312 - RNA, 19 nt, synthetic construct
  source 1..19: mol_type = other RNA
tttaataaactcaaaaata

SEQ ID NO: 9313 - RNA, 19 nt, synthetic construct
  source 1..19: mol_type = other RNA
ctttaataaactcaaaaat

SEQ ID NO: 9314 - RNA, 19 nt, synthetic construct
  source 1..19: mol_type = other RNA
tctttaataaactcaaaaa

SEQ ID NO: 9315 - RNA, 19 nt, synthetic construct
  source 1..19: mol_type = other RNA
atctttaataaactcaaaa

SEQ ID NO: 9316 - RNA, 19 nt, synthetic construct
  source 1..19: mol_type = other RNA
aatctttaataaactcaaa

SEQ ID NO: 9317 - RNA, 19 nt, synthetic construct
  source 1..19: mol_type = other RNA
caatctttaataaactcaa

SEQ ID NO: 9318 - RNA, 19 nt, synthetic construct
  source 1..19: mol_type = other RNA
tcaatctttaataaactca

SEQ ID NO: 9319 - RNA, 19 nt, synthetic construct
  source 1..19: mol_type = other RNA
gtcaatctttaataaactc

SEQ ID NO: 9320 - RNA, 19 nt, synthetic construct
  source 1..19: mol_type = other RNA
tgtcaatctttaataaact

SEQ ID NO: 9321 - RNA, 19 nt, synthetic construct
  source 1..19: mol_type = other RNA
atgtcaatctttaataaac

SEQ ID NO: 9322 - RNA, 19 nt, synthetic construct
  source 1..19: mol_type = other RNA
aatgtcaatctttaataaa

SEQ ID NO: 9323 - RNA, 19 nt, synthetic construct
  source 1..19: mol_type = other RNA
aaatgtcaatctttaataa

SEQ ID NO: 9324 - RNA, 19 nt, synthetic construct
  source 1..19: mol_type = other RNA
aaaatgtcaatctttaata

SEQ ID NO: 9325 - RNA, 19 nt, synthetic construct
  source 1..19: mol_type = other RNA
taaaatgtcaatctttaat

SEQ ID NO: 9326 - RNA, 19 nt, synthetic construct
  source 1..19: mol_type = other RNA
ttaaaatgtcaatctttaa

SEQ ID NO: 9327 - RNA, 19 nt, synthetic construct
  source 1..19: mol_type = other RNA
cttaaaatgtcaatcttta

SEQ ID NO: 9328 - RNA, 19 nt, synthetic construct
  source 1..19: mol_type = other RNA
acttaaaatgtcaatcttt

SEQ ID NO: 9329 - RNA, 19 nt, synthetic construct
  source 1..19: mol_type = other RNA
tacttaaaatgtcaatctt

SEQ ID NO: 9330 - RNA, 19 nt, synthetic construct
  source 1..19: mol_type = other RNA
gtacttaaaatgtcaatct

SEQ ID NO: 9331 - RNA, 19 nt, synthetic construct
  source 1..19: mol_type = other RNA
tgtacttaaaatgtcaatc

SEQ ID NO: 9332 - RNA, 19 nt, synthetic construct
  source 1..19: mol_type = other RNA
ttgtacttaaaatgtcaat

SEQ ID NO: 9333 - RNA, 19 nt, synthetic construct
  source 1..19: mol_type = other RNA
gttgtacttaaaatgtcaa

SEQ ID NO: 9334 - RNA, 19 nt, synthetic construct
  source 1..19: mol_type = other RNA
agttgtacttaaaatgtca

SEQ ID NO: 9335 - RNA, 19 nt, synthetic construct
  source 1..19: mol_type = other RNA
aagttgtacttaaaatgtc

SEQ ID NO: 9336 - RNA, 19 nt, synthetic construct
  source 1..19: mol_type = other RNA
aaagttgtacttaaaatgt

SEQ ID NO: 9337 - RNA, 19 nt, synthetic construct
  source 1..19: mol_type = other RNA
aaaagttgtacttaaaatg

SEQ ID NO: 9338 - RNA, 19 nt, synthetic construct
  source 1..19: mol_type = other RNA
taaaagttgtacttaaaat

SEQ ID NO: 9339 - RNA, 19 nt, synthetic construct
  source 1..19: mol_type = other RNA
ttaaaagttgtacttaaaa

SEQ ID NO: 9340 - RNA, 19 nt, synthetic construct
  source 1..19: mol_type = other RNA
cttaaaagttgtacttaaa

SEQ ID NO: 9341 - RNA, 19 nt, synthetic construct
  source 1..19: mol_type = other RNA
ccttaaaagttgtacttaa

SEQ ID NO: 9342 - RNA, 19 nt, synthetic construct
  source 1..19: mol_type = other RNA
tccttaaaagttgtactta

SEQ ID NO: 9343 - RNA, 19 nt, synthetic construct
  source 1..19: mol_type = other RNA
gtccttaaaagttgtactt

SEQ ID NO: 9344 - RNA, 19 nt, synthetic construct
  source 1..19: mol_type = other RNA
agtccttaaaagttgtact

SEQ ID NO: 9345 - RNA, 19 nt, synthetic construct
  source 1..19: mol_type = other RNA
tagtccttaaaagttgtac

SEQ ID NO: 9346 - RNA, 19 nt, synthetic construct
  source 1..19: mol_type = other RNA
ttagtccttaaaagttgta

SEQ ID NO: 9347 - RNA, 19 nt, synthetic construct
  source 1..19: mol_type = other RNA
attagtccttaaaagttgt

SEQ ID NO: 9348 - RNA, 19 nt, synthetic construct
  source 1..19: mol_type = other RNA
aattagtccttaaaagttg

SEQ ID NO: 9349 - RNA, 19 nt, synthetic construct
  source 1..19: mol_type = other RNA
taattagtccttaaaagtt

SEQ ID NO: 9350 - RNA, 19 nt, synthetic construct
  source 1..19: mol_type = other RNA
gtaattagtccttaaaagt

SEQ ID NO: 9351 - RNA, 19 nt, synthetic construct
  source 1..19: mol_type = other RNA
agtaattagtccttaaaag

SEQ ID NO: 9352 - RNA, 19 nt, synthetic construct
  source 1..19: mol_type = other RNA
cagtaattagtccttaaaa

SEQ ID NO: 9353 - RNA, 19 nt, synthetic construct
  source 1..19: mol_type = other RNA
acagtaattagtccttaaa

SEQ ID NO: 9354 - RNA, 19 nt, synthetic construct
  source 1..19: mol_type = other RNA
cacagtaattagtccttaa

SEQ ID NO: 9355 - RNA, 19 nt, synthetic construct
  source 1..19: mol_type = other RNA
tcacagtaattagtcctta

SEQ ID NO: 9356 - RNA, 19 nt, synthetic construct
  source 1..19: mol_type = other RNA
atcacagtaattagtcctt

SEQ ID NO: 9357 - RNA, 19 nt, synthetic construct
  source 1..19: mol_type = other RNA
catcacagtaattagtcct

SEQ ID NO: 9358 - RNA, 19 nt, synthetic construct
  source 1..19: mol_type = other RNA
ccatcacagtaattagtcc

SEQ ID NO: 9359 - RNA, 19 nt, synthetic construct
  source 1..19: mol_type = other RNA
tccatcacagtaattagtc

SEQ ID NO: 9360 - RNA, 19 nt, synthetic construct
  source 1..19: mol_type = other RNA
gtccatcacagtaattagt

SEQ ID NO: 9361 - RNA, 19 nt, synthetic construct
  source 1..19: mol_type = other RNA
tgtccatcacagtaattag

SEQ ID NO: 9362 - RNA, 19 nt, synthetic construct
  source 1..19: mol_type = other RNA
gtgtccatcacagtaatta

SEQ ID NO: 9363 - RNA, 19 nt, synthetic construct
  source 1..19: mol_type = other RNA
tgtgtccatcacagtaatt

SEQ ID NO: 9364 - RNA, 19 nt, synthetic construct
  source 1..19: mol_type = other RNA
ctgtgtccatcacagtaat

SEQ ID NO: 9365 - RNA, 19 nt, synthetic construct
  source 1..19: mol_type = other RNA
tctgtgtccatcacagtaa

SEQ ID NO: 9366 - RNA, 19 nt, synthetic construct
  source 1..19: mol_type = other RNA
ttctgtgtccatcacagta

SEQ ID NO: 9367 - RNA, 19 nt, synthetic construct
  source 1..19: mol_type = other RNA
tttctgtgtccatcacagt

SEQ ID NO: 9368 - RNA, 19 nt, synthetic construct
  source 1..19: mol_type = other RNA
atttctgtgtccatcacag

SEQ ID NO: 9369 - RNA, 19 nt, synthetic construct
  source 1..19: mol_type = other RNA
catttctgtgtccatcaca

SEQ ID NO: 9370 - RNA, 19 nt, synthetic construct
  source 1..19: mol_type = other RNA
acatttctgtgtccatcac

SEQ ID NO: 9371 - RNA, 19 nt, synthetic construct
  source 1..19: mol_type = other RNA
tacatttctgtgtccatca

SEQ ID NO: 9372 - RNA, 19 nt, synthetic construct
  source 1..19: mol_type = other RNA
ctacatttctgtgtccatc

SEQ ID NO: 9373 - RNA, 19 nt, synthetic construct
  source 1..19: mol_type = other RNA
gctacatttctgtgtccat

SEQ ID NO: 9374 - RNA, 19 nt, synthetic construct
  source 1..19: mol_type = other RNA
agctacatttctgtgtcca

SEQ ID NO: 9375 - RNA, 19 nt, synthetic construct
  source 1..19: mol_type = other RNA
cagctacatttctgtgtcc

SEQ ID NO: 9376 - RNA, 19 nt, synthetic construct
  source 1..19: mol_type = other RNA
acagctacatttctgtgtc

SEQ ID NO: 9377 - RNA, 19 nt, synthetic construct
  source 1..19: mol_type = other RNA
cacagctacatttctgtgt

SEQ ID NO: 9378 - RNA, 19 nt, synthetic construct
  source 1..19: mol_type = other RNA
acacagctacatttctgtg

SEQ ID NO: 9379 - RNA, 19 nt, synthetic construct
  source 1..19: mol_type = other RNA
aacacagctacatttctgt

SEQ ID NO: 9380 - RNA, 19 nt, synthetic construct
  source 1..19: mol_type = other RNA
gaacacagctacatttctg

SEQ ID NO: 9381 - RNA, 19 nt, synthetic construct
  source 1..19: mol_type = other RNA
agaacacagctacatttct

SEQ ID NO: 9382 - RNA, 19 nt, synthetic construct
  source 1..19: mol_type = other RNA
cagaacacagctacatttc

SEQ ID NO: 9383 - RNA, 19 nt, synthetic construct
  source 1..19: mol_type = other RNA
ccagaacacagctacattt

SEQ ID NO: 9384 - RNA, 19 nt, synthetic construct
  source 1..19: mol_type = other RNA
tccagaacacagctacatt

SEQ ID NO: 9385 - RNA, 19 nt, synthetic construct
  source 1..19: mol_type = other RNA
ttccagaacacagctacat

SEQ ID NO: 9386 - RNA, 19 nt, synthetic construct
  source 1..19: mol_type = other RNA
gttccagaacacagctaca

SEQ ID NO: 9387 - RNA, 19 nt, synthetic construct
  source 1..19: mol_type = other RNA
agttccagaacacagctac

SEQ ID NO: 9388 - RNA, 19 nt, synthetic construct
  source 1..19: mol_type = other RNA
cagttccagaacacagcta

SEQ ID NO: 9389 - RNA, 19 nt, synthetic construct
  source 1..19: mol_type = other RNA
tcagttccagaacacagct

SEQ ID NO: 9390 - RNA, 19 nt, synthetic construct
  source 1..19: mol_type = other RNA
ttcagttccagaacacagc

SEQ ID NO: 9391 - RNA, 19 nt, synthetic construct
  source 1..19: mol_type = other RNA
attcagttccagaacacag

SEQ ID NO: 9392 - RNA, 19 nt, synthetic construct
  source 1..19: mol_type = other RNA
gattcagttccagaacaca

SEQ ID NO: 9393 - RNA, 19 nt, synthetic construct
  source 1..19: mol_type = other RNA
agattcagttccagaacac

SEQ ID NO: 9394 - RNA, 19 nt, synthetic construct
  source 1..19: mol_type = other RNA
aagattcagttccagaaca

SEQ ID NO: 9395 - RNA, 19 nt, synthetic construct
  source 1..19: mol_type = other RNA
taagattcagttccagaac

SEQ ID NO: 9396 - RNA, 19 nt, synthetic construct
  source 1..19: mol_type = other RNA
gtaagattcagttccagaa

SEQ ID NO: 9397 - RNA, 19 nt, synthetic construct
  source 1..19: mol_type = other RNA
tgtaagattcagttccaga

SEQ ID NO: 9398 - RNA, 19 nt, synthetic construct
  source 1..19: mol_type = other RNA
atgtaagattcagttccag

SEQ ID NO: 9399 - RNA, 19 nt, synthetic construct
  source 1..19: mol_type = other RNA
catgtaagattcagttcca

SEQ ID NO: 9400 - RNA, 19 nt, synthetic construct
  source 1..19: mol_type = other RNA
ccatgtaagattcagttcc

SEQ ID NO: 9401 - RNA, 19 nt, synthetic construct
  source 1..19: mol_type = other RNA
accatgtaagattcagttc

SEQ ID NO: 9402 - RNA, 19 nt, synthetic construct
  source 1..19: mol_type = other RNA
taccatgtaagattcagtt

SEQ ID NO: 9403 - RNA, 19 nt, synthetic construct
  source 1..19: mol_type = other RNA
ataccatgtaagattcagt

SEQ ID NO: 9404 - RNA, 19 nt, synthetic construct
  source 1..19: mol_type = other RNA
tataccatgtaagattcag

SEQ ID NO: 9405 - RNA, 19 nt, synthetic construct
  source 1..19: mol_type = other RNA
gtataccatgtaagattca

SEQ ID NO: 9406 - RNA, 19 nt, synthetic construct
  source 1..19: mol_type = other RNA
agtataccatgtaagattc

SEQ ID NO: 9407 - RNA, 19 nt, synthetic construct
  source 1..19: mol_type = other RNA
aagtataccatgtaagatt

SEQ ID NO: 9408 - RNA, 19 nt, synthetic construct
  source 1..19: mol_type = other RNA
taagtataccatgtaagat

SEQ ID NO: 9409 - RNA, 19 nt, synthetic construct
  source 1..19: mol_type = other RNA
ctaagtataccatgtaaga

SEQ ID NO: 9410 - RNA, 19 nt, synthetic construct
  source 1..19: mol_type = other RNA
actaagtataccatgtaag

SEQ ID NO: 9411 - RNA, 19 nt, synthetic construct
  source 1..19: mol_type = other RNA
cactaagtataccatgtaa

SEQ ID NO: 9412 - RNA, 19 nt, synthetic construct
  source 1..19: mol_type = other RNA
gcactaagtataccatgta

SEQ ID NO: 9413 - RNA, 19 nt, synthetic construct
  source 1..19: mol_type = other RNA
agcactaagtataccatgt

SEQ ID NO: 9414 - RNA, 19 nt, synthetic construct
  source 1..19: mol_type = other RNA
cagcactaagtataccatg

SEQ ID NO: 9415 - RNA, 19 nt, synthetic construct
  source 1..19: mol_type = other RNA
gcagcactaagtataccat

SEQ ID NO: 9416 - RNA, 19 nt, synthetic construct
  source 1..19: mol_type = other RNA
agcagcactaagtatacca

SEQ ID NO: 9417 - RNA, 19 nt, synthetic construct
  source 1..19: mol_type = other RNA
cagcagcactaagtatacc

SEQ ID NO: 9418 - RNA, 19 nt, synthetic construct
  source 1..19: mol_type = other RNA
ccagcagcactaagtatac

SEQ ID NO: 9419 - RNA, 19 nt, synthetic construct
  source 1..19: mol_type = other RNA
cccagcagcactaagtata

SEQ ID NO: 9420 - RNA, 19 nt, synthetic construct
  source 1..19: mol_type = other RNA
acccagcagcactaagtat

SEQ ID NO: 9421 - RNA, 19 nt, synthetic construct
  source 1..19: mol_type = other RNA
tacccagcagcactaagta

SEQ ID NO: 9422 - RNA, 19 nt, synthetic construct
  source 1..19: mol_type = other RNA
ttacccagcagcactaagt

SEQ ID NO: 9423 - RNA, 19 nt, synthetic construct
  source 1..19: mol_type = other RNA
attacccagcagcactaag

SEQ ID NO: 9424 - RNA, 19 nt, synthetic construct
  source 1..19: mol_type = other RNA
aattacccagcagcactaa

SEQ ID NO: 9425 - RNA, 19 nt, synthetic construct
  source 1..19: mol_type = other RNA
aaattacccagcagcacta

SEQ ID NO: 9426 - RNA, 19 nt, synthetic construct
  source 1..19: mol_type = other RNA
caaattacccagcagcact

SEQ ID NO: 9427 - RNA, 19 nt, synthetic construct
  source 1..19: mol_type = other RNA
acaaattacccagcagcac

SEQ ID NO: 9428 - RNA, 19 nt, synthetic construct
  source 1..19: mol_type = other RNA
aacaaattacccagcagca

SEQ ID NO: 9429 - RNA, 19 nt, synthetic construct
  source 1..19: mol_type = other RNA
caacaaattacccagcagc

SEQ ID NO: 9430 - RNA, 19 nt, synthetic construct
  source 1..19: mol_type = other RNA
ccaacaaattacccagcag

SEQ ID NO: 9431 - RNA, 19 nt, synthetic construct
  source 1..19: mol_type = other RNA
accaacaaattacccagca

SEQ ID NO: 9432 - RNA, 19 nt, synthetic construct
  source 1..19: mol_type = other RNA
taccaacaaattacccagc

SEQ ID NO: 9433 - RNA, 19 nt, synthetic construct
  source 1..19: mol_type = other RNA
ataccaacaaattacccag

SEQ ID NO: 9434 - RNA, 19 nt, synthetic construct
  source 1..19: mol_type = other RNA
tataccaacaaattaccca

SEQ ID NO: 9435 - RNA, 19 nt, synthetic construct
  source 1..19: mol_type = other RNA
atataccaacaaattaccc

SEQ ID NO: 9436 - RNA, 19 nt, synthetic construct
  source 1..19: mol_type = other RNA
aatataccaacaaattacc

SEQ ID NO: 9437 - RNA, 19 nt, synthetic construct
  source 1..19: mol_type = other RNA
taatataccaacaaattac

SEQ ID NO: 9438 - RNA, 19 nt, synthetic construct
  source 1..19: mol_type = other RNA
ataatataccaacaaatta

SEQ ID NO: 9439 - RNA, 19 nt, synthetic construct
  source 1..19: mol_type = other RNA
gataatataccaacaaatt

SEQ ID NO: 9440 - RNA, 19 nt, synthetic construct
  source 1..19: mol_type = other RNA
agataatataccaacaaat

SEQ ID NO: 9441 - RNA, 19 nt, synthetic construct
  source 1..19: mol_type = other RNA
cagataatataccaacaaa

SEQ ID NO: 9442 - RNA, 19 nt, synthetic construct
  source 1..19: mol_type = other RNA
ccagataatataccaacaa

SEQ ID NO: 9443 - RNA, 19 nt, synthetic construct
  source 1..19: mol_type = other RNA
accagataatataccaaca

SEQ ID NO: 9444 - RNA, 19 nt, synthetic construct
  source 1..19: mol_type = other RNA
aaccagataatataccaac

SEQ ID NO: 9445 - RNA, 19 nt, synthetic construct
  source 1..19: mol_type = other RNA
taaccagataatataccaa

SEQ ID NO: 9446 - RNA, 19 nt, synthetic construct
  source 1..19: mol_type = other RNA
ctaaccagataatatacca

SEQ ID NO: 9447 - RNA, 19 nt, synthetic construct
  source 1..19: mol_type = other RNA
actaaccagataatatacc

SEQ ID NO: 9448 - RNA, 19 nt, synthetic construct
  source 1..19: mol_type = other RNA
cactaaccagataatatac

SEQ ID NO: 9449 - RNA, 19 nt, synthetic construct
  source 1..19: mol_type = other RNA
ccactaaccagataatata

SEQ ID NO: 9450 - RNA, 19 nt, synthetic construct
  source 1..19: mol_type = other RNA
accactaaccagataatat

SEQ ID NO: 9451 - RNA, 19 nt, synthetic construct
  source 1..19: mol_type = other RNA
aaccactaaccagataata

SEQ ID NO: 9452 - RNA, 19 nt, synthetic construct
  source 1..19: mol_type = other RNA
taaccactaaccagataat

SEQ ID NO: 9453 - RNA, 19 nt, synthetic construct
  source 1..19: mol_type = other RNA
ttaaccactaaccagataa

SEQ ID NO: 9454 - RNA, 19 nt, synthetic construct
  source 1..19: mol_type = other RNA
attaaccactaaccagata

SEQ ID NO: 9455 - RNA, 19 nt, synthetic construct
  source 1..19: mol_type = other RNA
cattaaccactaaccagat

SEQ ID NO: 9456 - RNA, 19 nt, synthetic construct
  source 1..19: mol_type = other RNA
gcattaaccactaaccaga

SEQ ID NO: 9457 - RNA, 19 nt, synthetic construct
  source 1..19: mol_type = other RNA
agcattaaccactaaccag

SEQ ID NO: 9458 - RNA, 19 nt, synthetic construct
  source 1..19: mol_type = other RNA
aagcattaaccactaacca

SEQ ID NO: 9459 - RNA, 19 nt, synthetic construct
  source 1..19: mol_type = other RNA
gaagcattaaccactaacc

SEQ ID NO: 9460 - RNA, 19 nt, synthetic construct
  source 1..19: mol_type = other RNA
ggaagcattaaccactaac

SEQ ID NO: 9461 - RNA, 19 nt, synthetic construct
  source 1..19: mol_type = other RNA
aggaagcattaaccactaa

SEQ ID NO: 9462 - RNA, 19 nt, synthetic construct
  source 1..19: mol_type = other RNA
aaggaagcattaaccacta

SEQ ID NO: 9463 - RNA, 19 nt, synthetic construct
  source 1..19: mol_type = other RNA
aaaggaagcattaaccact

SEQ ID NO: 9464 - RNA, 19 nt, synthetic construct
  source 1..19: mol_type = other RNA
taaaggaagcattaaccac

SEQ ID NO: 9465 - RNA, 19 nt, synthetic construct
  source 1..19: mol_type = other RNA
ttaaaggaagcattaacca

SEQ ID NO: 9466 - RNA, 19 nt, synthetic construct
  source 1..19: mol_type = other RNA
tttaaaggaagcattaacc

SEQ ID NO: 9467 - RNA, 19 nt, synthetic construct
  source 1..19: mol_type = other RNA
ttttaaaggaagcattaac

SEQ ID NO: 9468 - RNA, 19 nt, synthetic construct
  source 1..19: mol_type = other RNA
tttttaaaggaagcattaa

SEQ ID NO: 9469 - RNA, 19 nt, synthetic construct
  source 1..19: mol_type = other RNA
atttttaaaggaagcatta

SEQ ID NO: 9470 - RNA, 19 nt, synthetic construct
  source 1..19: mol_type = other RNA
tatttttaaaggaagcatt

SEQ ID NO: 9471 - RNA, 19 nt, synthetic construct
  source 1..19: mol_type = other RNA
ttatttttaaaggaagcat

SEQ ID NO: 9472 - RNA, 19 nt, synthetic construct
  source 1..19: mol_type = other RNA
attatttttaaaggaagca

SEQ ID NO: 9473 - RNA, 19 nt, synthetic construct
  source 1..19: mol_type = other RNA
aattatttttaaaggaagc

SEQ ID NO: 9474 - RNA, 19 nt, synthetic construct
  source 1..19: mol_type = other RNA
caattatttttaaaggaag

SEQ ID NO: 9475 - RNA, 19 nt, synthetic construct
  source 1..19: mol_type = other RNA
tcaattatttttaaaggaa

SEQ ID NO: 9476 - RNA, 19 nt, synthetic construct
  source 1..19: mol_type = other RNA
ctcaattatttttaaagga

SEQ ID NO: 9477 - RNA, 19 nt, synthetic construct
  source 1..19: mol_type = other RNA
actcaattatttttaaagg

SEQ ID NO: 9478 - RNA, 19 nt, synthetic construct
  source 1..19: mol_type = other RNA
gactcaattatttttaaag

SEQ ID NO: 9479 - RNA, 19 nt, synthetic construct
  source 1..19: mol_type = other RNA
tgactcaattatttttaaa

SEQ ID NO: 9480 - RNA, 19 nt, synthetic construct
  source 1..19: mol_type = other RNA
atgactcaattatttttaa

SEQ ID NO: 9481 - RNA, 19 nt, synthetic construct
  source 1..19: mol_type = other RNA
gatgactcaattattttta

SEQ ID NO: 9482 - RNA, 19 nt, synthetic construct
  source 1..19: mol_type = other RNA
ggatgactcaattattttt

SEQ ID NO: 9483 - RNA, 19 nt, synthetic construct
  source 1..19: mol_type = other RNA
tggatgactcaattatttt

SEQ ID NO: 9484 - RNA, 19 nt, synthetic construct
  source 1..19: mol_type = other RNA
atggatgactcaattattt

SEQ ID NO: 9485 - RNA, 19 nt, synthetic construct
  source 1..19: mol_type = other RNA
aatggatgactcaattatt

SEQ ID NO: 9486 - RNA, 19 nt, synthetic construct
  source 1..19: mol_type = other RNA
gaatggatgactcaattat

SEQ ID NO: 9487 - RNA, 19 nt, synthetic construct
  source 1..19: mol_type = other RNA
tgaatggatgactcaatta

SEQ ID NO: 9488 - RNA, 19 nt, synthetic construct
  source 1..19: mol_type = other RNA
gtgaatggatgactcaatt

SEQ ID NO: 9489 - RNA, 19 nt, synthetic construct
  source 1..19: mol_type = other RNA
agtgaatggatgactcaat

SEQ ID NO: 9490 - RNA, 19 nt, synthetic construct
  source 1..19: mol_type = other RNA
gagtgaatggatgactcaa

SEQ ID NO: 9491 - RNA, 19 nt, synthetic construct
  source 1..19: mol_type = other RNA
agagtgaatggatgactca

SEQ ID NO: 9492 - RNA, 19 nt, synthetic construct
  source 1..19: mol_type = other RNA
aagagtgaatggatgactc

SEQ ID NO: 9493 - RNA, 19 nt, synthetic construct
  source 1..19: mol_type = other RNA
aaagagtgaatggatgact

SEQ ID NO: 9494 - RNA, 19 nt, synthetic construct
  source 1..19: mol_type = other RNA
aaaagagtgaatggatgac

SEQ ID NO: 9495 - RNA, 19 nt, synthetic construct
  source 1..19: mol_type = other RNA
aaaaagagtgaatggatga

SEQ ID NO: 9496 - RNA, 19 nt, synthetic construct
  source 1..19: mol_type = other RNA
gaaaaagagtgaatggatg

SEQ ID NO: 9497 - RNA, 19 nt, synthetic construct
  source 1..19: mol_type = other RNA
tgaaaaagagtgaatggat

SEQ ID NO: 9498 - RNA, 19 nt, synthetic construct
  source 1..19: mol_type = other RNA
ctgaaaaagagtgaatgga

SEQ ID NO: 9499 - RNA, 19 nt, synthetic construct
  source 1..19: mol_type = other RNA
actgaaaaagagtgaatgg

SEQ ID NO: 9500 - RNA, 19 nt, synthetic construct
  source 1..19: mol_type = other RNA
aactgaaaaagagtgaatg

SEQ ID NO: 9501 - RNA, 19 nt, synthetic construct
  source 1..19: mol_type = other RNA
aaactgaaaaagagtgaat

SEQ ID NO: 9502 - RNA, 19 nt, synthetic construct
  source 1..19: mol_type = other RNA
aaaactgaaaaagagtgaa

SEQ ID NO: 9503 - RNA, 19 nt, synthetic construct
  source 1..19: mol_type = other RNA
taaaactgaaaaagagtga

SEQ ID NO: 9504 - RNA, 19 nt, synthetic construct
  source 1..19: mol_type = other RNA
ataaaactgaaaaagagtg

SEQ ID NO: 9505 - RNA, 19 nt, synthetic construct
  source 1..19: mol_type = other RNA
gataaaactgaaaaagagt

SEQ ID NO: 9506 - RNA, 19 nt, synthetic construct
  source 1..19: mol_type = other RNA
agataaaactgaaaaagag

SEQ ID NO: 9507 - RNA, 19 nt, synthetic construct
  source 1..19: mol_type = other RNA
cagataaaactgaaaaaga

SEQ ID NO: 9508 - RNA, 19 nt, synthetic construct
  source 1..19: mol_type = other RNA
acagataaaactgaaaaag

SEQ ID NO: 9509 - RNA, 19 nt, synthetic construct
  source 1..19: mol_type = other RNA
gacagataaaactgaaaaa

SEQ ID NO: 9510 - RNA, 19 nt, synthetic construct
  source 1..19: mol_type = other RNA
tgacagataaaactgaaaa

SEQ ID NO: 9511 - RNA, 19 nt, synthetic construct
  source 1..19: mol_type = other RNA
ttgacagataaaactgaaa

SEQ ID NO: 9512 - RNA, 19 nt, synthetic construct
  source 1..19: mol_type = other RNA
attgacagataaaactgaa

SEQ ID NO: 9513 - RNA, 19 nt, synthetic construct
  source 1..19: mol_type = other RNA
tattgacagataaaactga

SEQ ID NO: 9514 - RNA, 19 nt, synthetic construct
  source 1..19: mol_type = other RNA
ctattgacagataaaactg

SEQ ID NO: 9515 - RNA, 19 nt, synthetic construct
  source 1..19: mol_type = other RNA
actattgacagataaaact

SEQ ID NO: 9516 - RNA, 19 nt, synthetic construct
  source 1..19: mol_type = other RNA
tactattgacagataaaac

SEQ ID NO: 9517 - RNA, 19 nt, synthetic construct
  source 1..19: mol_type = other RNA
ctactattgacagataaaa

SEQ ID NO: 9518 - RNA, 19 nt, synthetic construct
  source 1..19: mol_type = other RNA
gctactattgacagataaa

SEQ ID NO: 9519 - RNA, 19 nt, synthetic construct
  source 1..19: mol_type = other RNA
agctactattgacagataa

SEQ ID NO: 9520 - RNA, 19 nt, synthetic construct
  source 1..19: mol_type = other RNA
tagctactattgacagata

SEQ ID NO: 9521 - RNA, 19 nt, synthetic construct
  source 1..19: mol_type = other RNA
gtagctactattgacagat

SEQ ID NO: 9522 - RNA, 19 nt, synthetic construct
  source 1..19: mol_type = other RNA
tgtagctactattgacaga

SEQ ID NO: 9523 - RNA, 19 nt, synthetic construct
  source 1..19: mol_type = other RNA
atgtagctactattgacag

SEQ ID NO: 9524 - RNA, 19 nt, synthetic construct
  source 1..19: mol_type = other RNA
aatgtagctactattgaca

SEQ ID NO: 9525 - RNA, 19 nt, synthetic construct
  source 1..19: mol_type = other RNA
aaatgtagctactattgac

SEQ ID NO: 9526 - RNA, 19 nt, synthetic construct
  source 1..19: mol_type = other RNA
aaaatgtagctactattga

SEQ ID NO: 9527 - RNA, 19 nt, synthetic construct
  source 1..19: mol_type = other RNA
aaaaatgtagctactattg

SEQ ID NO: 9528 - RNA, 19 nt, synthetic construct
  source 1..19: mol_type = other RNA
taaaaatgtagctactatt

SEQ ID NO: 9529 - RNA, 19 nt, synthetic construct
  source 1..19: mol_type = other RNA
ttaaaaatgtagctactat

SEQ ID NO: 9530 - RNA, 19 nt, synthetic construct
  source 1..19: mol_type = other RNA
attaaaaatgtagctacta

SEQ ID NO: 9531 - RNA, 19 nt, synthetic construct
  source 1..19: mol_type = other RNA
cattaaaaatgtagctact

SEQ ID NO: 9532 - RNA, 19 nt, synthetic construct
  source 1..19: mol_type = other RNA
ccattaaaaatgtagctac

SEQ ID NO: 9533 - RNA, 19 nt, synthetic construct
  source 1..19: mol_type = other RNA
cccattaaaaatgtagcta

SEQ ID NO: 9534 - RNA, 19 nt, synthetic construct
  source 1..19: mol_type = other RNA
tcccattaaaaatgtagct

SEQ ID NO: 9535 - RNA, 19 nt, synthetic construct
  source 1..19: mol_type = other RNA
ctcccattaaaaatgtagc

SEQ ID NO: 9536 - RNA, 19 nt, synthetic construct
  source 1..19: mol_type = other RNA
gctcccattaaaaatgtag

SEQ ID NO: 9537 - RNA, 19 nt, synthetic construct
  source 1..19: mol_type = other RNA
tgctcccattaaaaatgta

SEQ ID NO: 9538 - RNA, 19 nt, synthetic construct
  source 1..19: mol_type = other RNA
gtgctcccattaaaaatgt

SEQ ID NO: 9539 - RNA, 19 nt, synthetic construct
  source 1..19: mol_type = other RNA
ggtgctcccattaaaaatg

SEQ ID NO: 9540 - RNA, 19 nt, synthetic construct
  source 1..19: mol_type = other RNA
aggtgctcccattaaaaat

SEQ ID NO: 9541 - RNA, 19 nt, synthetic construct
  source 1..19: mol_type = other RNA
aaggtgctcccattaaaaa

SEQ ID NO: 9542 - RNA, 19 nt, synthetic construct
  source 1..19: mol_type = other RNA
aaaggtgctcccattaaaa

SEQ ID NO: 9543 - RNA, 19 nt, synthetic construct
  source 1..19: mol_type = other RNA
aaaaggtgctcccattaaa

SEQ ID NO: 9544 - RNA, 19 nt, synthetic construct
  source 1..19: mol_type = other RNA
taaaaggtgctcccattaa

SEQ ID NO: 9545 - RNA, 19 nt, synthetic construct
  source 1..19: mol_type = other RNA
ataaaaggtgctcccatta

SEQ ID NO: 9546 - RNA, 19 nt, synthetic construct
  source 1..19: mol_type = other RNA
gataaaaggtgctcccatt

SEQ ID NO: 9547 - RNA, 19 nt, synthetic construct
  source 1..19: mol_type = other RNA
ggataaaaggtgctcccat

SEQ ID NO: 9548 - RNA, 19 nt, synthetic construct
  source 1..19: mol_type = other RNA
gggataaaaggtgctccca

SEQ ID NO: 9549 - RNA, 19 nt, synthetic construct
  source 1..19: mol_type = other RNA
tgggataaaaggtgctccc

SEQ ID NO: 9550 - RNA, 19 nt, synthetic construct
  source 1..19: mol_type = other RNA
ttgggataaaaggtgctcc

SEQ ID NO: 9551 - RNA, 19 nt, synthetic construct
  source 1..19: mol_type = other RNA
tttgggataaaaggtgctc

SEQ ID NO: 9552 - RNA, 19 nt, synthetic construct
  source 1..19: mol_type = other RNA
ctttgggataaaaggtgct

SEQ ID NO: 9553 - RNA, 19 nt, synthetic construct
  source 1..19: mol_type = other RNA
actttgggataaaaggtgc

SEQ ID NO: 9554 - RNA, 19 nt, synthetic construct
  source 1..19: mol_type = other RNA
cactttgggataaaaggtg

SEQ ID NO: 9555 - RNA, 19 nt, synthetic construct
  source 1..19: mol_type = other RNA
gcactttgggataaaaggt

SEQ ID NO: 9556 - RNA, 19 nt, synthetic construct
  source 1..19: mol_type = other RNA
agcactttgggataaaagg

SEQ ID NO: 9557 - RNA, 19 nt, synthetic construct
  source 1..19: mol_type = other RNA
aagcactttgggataaaag

SEQ ID NO: 9558 - RNA, 19 nt, synthetic construct
  source 1..19: mol_type = other RNA
aaagcactttgggataaaa

SEQ ID NO: 9559 - RNA, 19 nt, synthetic construct
  source 1..19: mol_type = other RNA
taaagcactttgggataaa

SEQ ID NO: 9560 - RNA, 19 nt, synthetic construct
  source 1..19: mol_type = other RNA
ataaagcactttgggataa

SEQ ID NO: 9561 - RNA, 19 nt, synthetic construct
  source 1..19: mol_type = other RNA
tataaagcactttgggata

SEQ ID NO: 9562 - RNA, 19 nt, synthetic construct
  source 1..19: mol_type = other RNA
ttataaagcactttgggat

SEQ ID NO: 9563 - RNA, 19 nt, synthetic construct
  source 1..19: mol_type = other RNA
tttataaagcactttggga

SEQ ID NO: 9564 - RNA, 19 nt, synthetic construct
  source 1..19: mol_type = other RNA
atttataaagcactttggg

SEQ ID NO: 9565 - RNA, 19 nt, synthetic construct
  source 1..19: mol_type = other RNA
aatttataaagcactttgg

SEQ ID NO: 9566 - RNA, 19 nt, synthetic construct
  source 1..19: mol_type = other RNA
caatttataaagcactttg

SEQ ID NO: 9567 - RNA, 19 nt, synthetic construct
  source 1..19: mol_type = other RNA
tcaatttataaagcacttt

SEQ ID NO: 9568 - RNA, 19 nt, synthetic construct
  source 1..19: mol_type = other RNA
ctcaatttataaagcactt

SEQ ID NO: 9569 - RNA, 19 nt, synthetic construct
  source 1..19: mol_type = other RNA
actcaatttataaagcact

SEQ ID NO: 9570 - RNA, 19 nt, synthetic construct
  source 1..19: mol_type = other RNA
cactcaatttataaagcac

SEQ ID NO: 9571 - RNA, 19 nt, synthetic construct
  source 1..19: mol_type = other RNA
ccactcaatttataaagca

SEQ ID NO: 9572 - RNA, 19 nt, synthetic construct
  source 1..19: mol_type = other RNA
tccactcaatttataaagc

SEQ ID NO: 9573 - RNA, 19 nt, synthetic construct
  source 1..19: mol_type = other RNA
gtccactcaatttataaag

SEQ ID NO: 9574 - RNA, 19 nt, synthetic construct
  source 1..19: mol_type = other RNA
agtccactcaatttataaa

SEQ ID NO: 9575 - RNA, 19 nt, synthetic construct
  source 1..19: mol_type = other RNA
cagtccactcaatttataa

SEQ ID NO: 9576 - RNA, 19 nt, synthetic construct
  source 1..19: mol_type = other RNA
tcagtccactcaatttata

SEQ ID NO: 9577 - RNA, 19 nt, synthetic construct
  source 1..19: mol_type = other RNA
atcagtccactcaatttat

SEQ ID NO: 9578 - RNA, 19 nt, synthetic construct
  source 1..19: mol_type = other RNA
tatcagtccactcaattta

SEQ ID NO: 9579 - RNA, 19 nt, synthetic construct
  source 1..19: mol_type = other RNA
atatcagtccactcaattt

SEQ ID NO: 9580 - RNA, 19 nt, synthetic construct
  source 1..19: mol_type = other RNA
tatatcagtccactcaatt

SEQ ID NO: 9581 - RNA, 19 nt, synthetic construct
  source 1..19: mol_type = other RNA
atatatcagtccactcaat

SEQ ID NO: 9582 - RNA, 19 nt, synthetic construct
  source 1..19: mol_type = other RNA
tatatatcagtccactcaa

SEQ ID NO: 9583 - RNA, 19 nt, synthetic construct
  source 1..19: mol_type = other RNA
atatatatcagtccactca

SEQ ID NO: 9584 - RNA, 19 nt, synthetic construct
  source 1..19: mol_type = other RNA
gatatatatcagtccactc

SEQ ID NO: 9585 - RNA, 19 nt, synthetic construct
  source 1..19: mol_type = other RNA
tgatatatatcagtccact

SEQ ID NO: 9586 - RNA, 19 nt, synthetic construct
  source 1..19: mol_type = other RNA
gtgatatatatcagtccac

SEQ ID NO: 9587 - RNA, 19 nt, synthetic construct
  source 1..19: mol_type = other RNA
tgtgatatatatcagtcca

SEQ ID NO: 9588 - RNA, 19 nt, synthetic construct
  source 1..19: mol_type = other RNA
gtgtgatatatatcagtcc

SEQ ID NO: 9589 - RNA, 19 nt, synthetic construct
  source 1..19: mol_type = other RNA
ggtgtgatatatatcagtc

SEQ ID NO: 9590 - RNA, 19 nt, synthetic construct
  source 1..19: mol_type = other RNA
gggtgtgatatatatcagt

SEQ ID NO: 9591 - RNA, 19 nt, synthetic construct
  source 1..19: mol_type = other RNA
tgggtgtgatatatatcag

SEQ ID NO: 9592 - RNA, 19 nt, synthetic construct
  source 1..19: mol_type = other RNA
ctgggtgtgatatatatca

SEQ ID NO: 9593 - RNA, 19 nt, synthetic construct
  source 1..19: mol_type = other RNA
cctgggtgtgatatatatc

SEQ ID NO: 9594 - RNA, 19 nt, synthetic construct
  source 1..19: mol_type = other RNA
acctgggtgtgatatatat

SEQ ID NO: 9595 - RNA, 19 nt, synthetic construct
  source 1..19: mol_type = other RNA
tacctgggtgtgatatata

SEQ ID NO: 9596 - RNA, 19 nt, synthetic construct
  source 1..19: mol_type = other RNA
atacctgggtgtgatatat

SEQ ID NO: 9597 - RNA, 19 nt, synthetic construct
  source 1..19: mol_type = other RNA
gatacctgggtgtgatata

SEQ ID NO: 9598 - RNA, 19 nt, synthetic construct
  source 1..19: mol_type = other RNA
tgatacctgggtgtgatat

SEQ ID NO: 9599 - RNA, 19 nt, synthetic construct
  source 1..19: mol_type = other RNA
gtgatacctgggtgtgata

SEQ ID NO: 9600 - RNA, 19 nt, synthetic construct
  source 1..19: mol_type = other RNA
agtgatacctgggtgtgat

SEQ ID NO: 9601 - RNA, 19 nt, synthetic construct
  source 1..19: mol_type = other RNA
cagtgatacctgggtgtga

SEQ ID NO: 9602 - RNA, 19 nt, synthetic construct
  source 1..19: mol_type = other RNA
acagtgatacctgggtgtg

SEQ ID NO: 9603 - RNA, 19 nt, synthetic construct
  source 1..19: mol_type = other RNA
cacagtgatacctgggtgt

SEQ ID NO: 9604 - RNA, 19 nt, synthetic construct
  source 1..19: mol_type = other RNA
gcacagtgatacctgggtg

SEQ ID NO: 9605 - RNA, 19 nt, synthetic construct
  source 1..19: mol_type = other RNA
agcacagtgatacctgggt

SEQ ID NO: 9606 - RNA, 19 nt, synthetic construct
  source 1..19: mol_type = other RNA
cagcacagtgatacctggg

SEQ ID NO: 9607 - RNA, 19 nt, synthetic construct
  source 1..19: mol_type = other RNA
acagcacagtgatacctgg

SEQ ID NO: 9608 - RNA, 19 nt, synthetic construct
  source 1..19: mol_type = other RNA
gacagcacagtgatacctg

SEQ ID NO: 9609 - RNA, 19 nt, synthetic construct
  source 1..19: mol_type = other RNA
ggacagcacagtgatacct

SEQ ID NO: 9610 - RNA, 19 nt, synthetic construct
  source 1..19: mol_type = other RNA
aggacagcacagtgatacc

SEQ ID NO: 9611 - RNA, 19 nt, synthetic construct
  source 1..19: mol_type = other RNA
aaggacagcacagtgatac

SEQ ID NO: 9612 - RNA, 19 nt, synthetic construct
  source 1..19: mol_type = other RNA
aaaggacagcacagtgata

SEQ ID NO: 9613 - RNA, 19 nt, synthetic construct
  source 1..19: mol_type = other RNA
caaaggacagcacagtgat

SEQ ID NO: 9614 - RNA, 19 nt, synthetic construct
  source 1..19: mol_type = other RNA
gcaaaggacagcacagtga

SEQ ID NO: 9615 - RNA, 19 nt, synthetic construct
  source 1..19: mol_type = other RNA
agcaaaggacagcacagtg

SEQ ID NO: 9616 - RNA, 19 nt, synthetic construct
  source 1..19: mol_type = other RNA
cagcaaaggacagcacagt

SEQ ID NO: 9617 - RNA, 19 nt, synthetic construct
  source 1..19: mol_type = other RNA
acagcaaaggacagcacag

SEQ ID NO: 9618 - RNA, 19 nt, synthetic construct
  source 1..19: mol_type = other RNA
gacagcaaaggacagcaca

SEQ ID NO: 9619 - RNA, 19 nt, synthetic construct
  source 1..19: mol_type = other RNA
tgacagcaaaggacagcac

SEQ ID NO: 9620 - RNA, 19 nt, synthetic construct
  source 1..19: mol_type = other RNA
ctgacagcaaaggacagca

SEQ ID NO: 9621 - RNA, 19 nt, synthetic construct
  source 1..19: mol_type = other RNA
tctgacagcaaaggacagc

SEQ ID NO: 9622 - RNA, 19 nt, synthetic construct
  source 1..19: mol_type = other RNA
atctgacagcaaaggacag

SEQ ID NO: 9623 - RNA, 19 nt, synthetic construct
  source 1..19: mol_type = other RNA
aatctgacagcaaaggaca

SEQ ID NO: 9624 - RNA, 19 nt, synthetic construct
  source 1..19: mol_type = other RNA
aaatctgacagcaaaggac

SEQ ID NO: 9625 - RNA, 19 nt, synthetic construct
  source 1..19: mol_type = other RNA
taaatctgacagcaaagga

SEQ ID NO: 9626 - RNA, 19 nt, synthetic construct
  source 1..19: mol_type = other RNA
ctaaatctgacagcaaagg

SEQ ID NO: 9627 - RNA, 19 nt, synthetic construct
  source 1..19: mol_type = other RNA
tctaaatctgacagcaaag

SEQ ID NO: 9628 - RNA, 19 nt, synthetic construct
  source 1..19: mol_type = other RNA
ttctaaatctgacagcaaa

SEQ ID NO: 9629 - RNA, 19 nt, synthetic construct
  source 1..19: mol_type = other RNA
tttctaaatctgacagcaa

SEQ ID NO: 9630 - RNA, 19 nt, synthetic construct
  source 1..19: mol_type = other RNA
atttctaaatctgacagca

SEQ ID NO: 9631 - RNA, 19 nt, synthetic construct
  source 1..19: mol_type = other RNA
catttctaaatctgacagc

SEQ ID NO: 9632 - RNA, 19 nt, synthetic construct
  source 1..19: mol_type = other RNA
acatttctaaatctgacag

SEQ ID NO: 9633 - RNA, 19 nt, synthetic construct
  source 1..19: mol_type = other RNA
aacatttctaaatctgaca

SEQ ID NO: 9634 - RNA, 19 nt, synthetic construct
  source 1..19: mol_type = other RNA
aaacatttctaaatctgac

SEQ ID NO: 9635 - RNA, 19 nt, synthetic construct
  source 1..19: mol_type = other RNA
aaaacatttctaaatctga

SEQ ID NO: 9636 - RNA, 19 nt, synthetic construct
  source 1..19: mol_type = other RNA
aaaaacatttctaaatctg

SEQ ID NO: 9637 - RNA, 19 nt, synthetic construct
  source 1..19: mol_type = other RNA
taaaaacatttctaaatct

SEQ ID NO: 9638 - RNA, 19 nt, synthetic construct
  source 1..19: mol_type = other RNA
ttaaaaacatttctaaatc

SEQ ID NO: 9639 - RNA, 19 nt, synthetic construct
  source 1..19: mol_type = other RNA
cttaaaaacatttctaaat

SEQ ID NO: 9640 - RNA, 19 nt, synthetic construct
  source 1..19: mol_type = other RNA
tcttaaaaacatttctaaa

SEQ ID NO: 9641 - RNA, 19 nt, synthetic construct
  source 1..19: mol_type = other RNA
ctcttaaaaacatttctaa

SEQ ID NO: 9642 - RNA, 19 nt, synthetic construct
  source 1..19: mol_type = other RNA
gctcttaaaaacatttcta

SEQ ID NO: 9643 - RNA, 19 nt, synthetic construct
  source 1..19: mol_type = other RNA
agctcttaaaaacatttct

SEQ ID NO: 9644 - RNA, 19 nt, synthetic construct
  source 1..19: mol_type = other RNA
tagctcttaaaaacatttc

SEQ ID NO: 9645 - RNA, 19 nt, synthetic construct
  source 1..19: mol_type = other RNA
atagctcttaaaaacattt

SEQ ID NO: 9646 - RNA, 19 nt, synthetic construct
  source 1..19: mol_type = other RNA
catagctcttaaaaacatt

SEQ ID NO: 9647 - RNA, 19 nt, synthetic construct
  source 1..19: mol_type = other RNA
acatagctcttaaaaacat

SEQ ID NO: 9648 - RNA, 19 nt, synthetic construct
  source 1..19: mol_type = other RNA
cacatagctcttaaaaaca

SEQ ID NO: 9649 - RNA, 19 nt, synthetic construct
  source 1..19: mol_type = other RNA
tcacatagctcttaaaaac

SEQ ID NO: 9650 - RNA, 19 nt, synthetic construct
  source 1..19: mol_type = other RNA
ttcacatagctcttaaaaa

SEQ ID NO: 9651 - RNA, 19 nt, synthetic construct
  source 1..19: mol_type = other RNA
tttcacatagctcttaaaa

SEQ ID NO: 9652 - RNA, 19 nt, synthetic construct
  source 1..19: mol_type = other RNA
ttttcacatagctcttaaa

SEQ ID NO: 9653 - RNA, 19 nt, synthetic construct
  source 1..19: mol_type = other RNA
gttttcacatagctcttaa

SEQ ID NO: 9654 - RNA, 19 nt, synthetic construct
  source 1..19: mol_type = other RNA
tgttttcacatagctctta

SEQ ID NO: 9655 - RNA, 19 nt, synthetic construct
  source 1..19: mol_type = other RNA
ctgttttcacatagctctt

SEQ ID NO: 9656 - RNA, 19 nt, synthetic construct
  source 1..19: mol_type = other RNA
tctgttttcacatagctct

SEQ ID NO: 9657 - RNA, 19 nt, synthetic construct
  source 1..19: mol_type = other RNA
gtctgttttcacatagctc

SEQ ID NO: 9658 - RNA, 19 nt, synthetic construct
  source 1..19: mol_type = other RNA
tgtctgttttcacatagct

SEQ ID NO: 9659 - RNA, 19 nt, synthetic construct
  source 1..19: mol_type = other RNA
ttgtctgttttcacatagc

SEQ ID NO: 9660 - RNA, 19 nt, synthetic construct
  source 1..19: mol_type = other RNA
attgtctgttttcacatag

SEQ ID NO: 9661 - RNA, 19 nt, synthetic construct
  source 1..19: mol_type = other RNA
tattgtctgttttcacata

SEQ ID NO: 9662 - RNA, 19 nt, synthetic construct
  source 1..19: mol_type = other RNA
atattgtctgttttcacat

SEQ ID NO: 9663 - RNA, 19 nt, synthetic construct
  source 1..19: mol_type = other RNA
aatattgtctgttttcaca

SEQ ID NO: 9664 - RNA, 19 nt, synthetic construct
  source 1..19: mol_type = other RNA
taatattgtctgttttcac

SEQ ID NO: 9665 - RNA, 19 nt, synthetic construct
  source 1..19: mol_type = other RNA
ctaatattgtctgttttca

SEQ ID NO: 9666 - RNA, 19 nt, synthetic construct
  source 1..19: mol_type = other RNA
actaatattgtctgttttc

SEQ ID NO: 9667 - RNA, 19 nt, synthetic construct
  source 1..19: mol_type = other RNA
aactaatattgtctgtttt

SEQ ID NO: 9668 - RNA, 19 nt, synthetic construct
  source 1..19: mol_type = other RNA
aaactaatattgtctgttt

SEQ ID NO: 9669 - RNA, 19 nt, synthetic construct
  source 1..19: mol_type = other RNA
taaactaatattgtctgtt

SEQ ID NO: 9670 - RNA, 19 nt, synthetic construct
  source 1..19: mol_type = other RNA
ctaaactaatattgtctgt

SEQ ID NO: 9671 - RNA, 19 nt, synthetic construct
  source 1..19: mol_type = other RNA
cctaaactaatattgtctg

SEQ ID NO: 9672 - RNA, 19 nt, synthetic construct
  source 1..19: mol_type = other RNA
acctaaactaatattgtct

SEQ ID NO: 9673 - RNA, 19 nt, synthetic construct
  source 1..19: mol_type = other RNA
gacctaaactaatattgtc

SEQ ID NO: 9674 - RNA, 19 nt, synthetic construct
  source 1..19: mol_type = other RNA
cgacctaaactaatattgt

SEQ ID NO: 9675 - RNA, 19 nt, synthetic construct
  source 1..19: mol_type = other RNA
ccgacctaaactaatattg

SEQ ID NO: 9676 - RNA, 19 nt, synthetic construct
  source 1..19: mol_type = other RNA
cccgacctaaactaatatt

SEQ ID NO: 9677 - RNA, 19 nt, synthetic construct
  source 1..19: mol_type = other RNA
tcccgacctaaactaatat

SEQ ID NO: 9678 - RNA, 19 nt, synthetic construct
  source 1..19: mol_type = other RNA
ttcccgacctaaactaata

SEQ ID NO: 9679 - RNA, 19 nt, synthetic construct
  source 1..19: mol_type = other RNA
gttcccgacctaaactaat

SEQ ID NO: 9680 - RNA, 19 nt, synthetic construct
  source 1..19: mol_type = other RNA
agttcccgacctaaactaa

SEQ ID NO: 9681 - RNA, 19 nt, synthetic construct
  source 1..19: mol_type = other RNA
cagttcccgacctaaacta

SEQ ID NO: 9682 - RNA, 19 nt, synthetic construct
  source 1..19: mol_type = other RNA
tcagttcccgacctaaact

SEQ ID NO: 9683 - RNA, 19 nt, synthetic construct
  source 1..19: mol_type = other RNA
ctcagttcccgacctaaac

SEQ ID NO: 9684 - RNA, 19 nt, synthetic construct
  source 1..19: mol_type = other RNA
tctcagttcccgacctaaa

SEQ ID NO: 9685 - RNA, 19 nt, synthetic construct
  source 1..19: mol_type = other RNA
atctcagttcccgacctaa

SEQ ID NO: 9686 - RNA, 19 nt, synthetic construct
  source 1..19: mol_type = other RNA
tatctcagttcccgaccta

SEQ ID NO: 9687 - RNA, 19 nt, synthetic construct
  source 1..19: mol_type = other RNA
atatctcagttcccgacct

SEQ ID NO: 9688 - RNA, 19 nt, synthetic construct
  source 1..19: mol_type = other RNA
aatatctcagttcccgacc

SEQ ID NO: 9689 - RNA, 19 nt, synthetic construct
  source 1..19: mol_type = other RNA
caatatctcagttcccgac

SEQ ID NO: 9690 - RNA, 19 nt, synthetic construct
  source 1..19: mol_type = other RNA
acaatatctcagttcccga

SEQ ID NO: 9691 - RNA, 19 nt, synthetic construct
  source 1..19: mol_type = other RNA
tacaatatctcagttcccg

SEQ ID NO: 9692 - RNA, 19 nt, synthetic construct
  source 1..19: mol_type = other RNA
ttacaatatctcagttccc

SEQ ID NO: 9693 - RNA, 19 nt, synthetic construct
  source 1..19: mol_type = other RNA
attacaatatctcagttcc

SEQ ID NO: 9694 - RNA, 19 nt, synthetic construct
  source 1..19: mol_type = other RNA
gattacaatatctcagttc

SEQ ID NO: 9695 - RNA, 19 nt, synthetic construct
  source 1..19: mol_type = other RNA
tgattacaatatctcagtt

SEQ ID NO: 9696 - RNA, 19 nt, synthetic construct
  source 1..19: mol_type = other RNA
ttgattacaatatctcagt

SEQ ID NO: 9697 - RNA, 19 nt, synthetic construct
  source 1..19: mol_type = other RNA
tttgattacaatatctcag

SEQ ID NO: 9698 - RNA, 19 nt, synthetic construct
  source 1..19: mol_type = other RNA
atttgattacaatatctca

SEQ ID NO: 9699 - RNA, 19 nt, synthetic construct
  source 1..19: mol_type = other RNA
tatttgattacaatatctc

SEQ ID NO: 9700 - RNA, 19 nt, synthetic construct
  source 1..19: mol_type = other RNA
ctatttgattacaatatct

SEQ ID NO: 9701 - RNA, 19 nt, synthetic construct
  source 1..19: mol_type = other RNA
actatttgattacaatatc

SEQ ID NO: 9702 - RNA, 19 nt, synthetic construct
  source 1..19: mol_type = other RNA
aactatttgattacaatat

SEQ ID NO: 9703 - RNA, 19 nt, synthetic construct
  source 1..19: mol_type = other RNA
taactatttgattacaata

SEQ ID NO: 9704 - RNA, 19 nt, synthetic construct
  source 1..19: mol_type = other RNA
ttaactatttgattacaat

SEQ ID NO: 9705 - RNA, 19 nt, synthetic construct
  source 1..19: mol_type = other RNA
gttaactatttgattacaa

SEQ ID NO: 9706 - RNA, 19 nt, synthetic construct
  source 1..19: mol_type = other RNA
tgttaactatttgattaca

SEQ ID NO: 9707 - RNA, 19 nt, synthetic construct
  source 1..19: mol_type = other RNA
atgttaactatttgattac

SEQ ID NO: 9708 - RNA, 19 nt, synthetic construct
  source 1..19: mol_type = other RNA
gatgttaactatttgatta

SEQ ID NO: 9709 - RNA, 19 nt, synthetic construct
  source 1..19: mol_type = other RNA
tgatgttaactatttgatt

SEQ ID NO: 9710 - RNA, 19 nt, synthetic construct
  source 1..19: mol_type = other RNA
ctgatgttaactatttgat

SEQ ID NO: 9711 - RNA, 19 nt, synthetic construct
  source 1..19: mol_type = other RNA
cctgatgttaactatttga

SEQ ID NO: 9712 - RNA, 19 nt, synthetic construct
  source 1..19: mol_type = other RNA
tcctgatgttaactatttg

SEQ ID NO: 9713 - RNA, 19 nt, synthetic construct
  source 1..19: mol_type = other RNA
ttcctgatgttaactattt

SEQ ID NO: 9714 - RNA, 19 nt, synthetic construct
  source 1..19: mol_type = other RNA
cttcctgatgttaactatt

SEQ ID NO: 9715 - RNA, 19 nt, synthetic construct
  source 1..19: mol_type = other RNA
acttcctgatgttaactat

SEQ ID NO: 9716 - RNA, 19 nt, synthetic construct
  source 1..19: mol_type = other RNA
aacttcctgatgttaacta

SEQ ID NO: 9717 - RNA, 19 nt, synthetic construct
  source 1..19: mol_type = other RNA
taacttcctgatgttaact

SEQ ID NO: 9718 - RNA, 19 nt, synthetic construct
  source 1..19: mol_type = other RNA
ttaacttcctgatgttaac

SEQ ID NO: 9719 - RNA, 19 nt, synthetic construct
  source 1..19: mol_type = other RNA
attaacttcctgatgttaa

SEQ ID NO: 9720 - RNA, 19 nt, synthetic construct
  source 1..19: mol_type = other RNA
aattaacttcctgatgtta

SEQ ID NO: 9721 - RNA, 19 nt, synthetic construct
  source 1..19: mol_type = other RNA
aaattaacttcctgatgtt

SEQ ID NO: 9722 - RNA, 19 nt, synthetic construct
  source 1..19: mol_type = other RNA
caaattaacttcctgatgt

SEQ ID NO: 9723 - RNA, 19 nt, synthetic construct
  source 1..19: mol_type = other RNA
ccaaattaacttcctgatg

SEQ ID NO: 9724 - RNA, 19 nt, synthetic construct
  source 1..19: mol_type = other RNA
gccaaattaacttcctgat

SEQ ID NO: 9725 - RNA, 19 nt, synthetic construct
  source 1..19: mol_type = other RNA
agccaaattaacttcctga

SEQ ID NO: 9726 - RNA, 19 nt, synthetic construct
  source 1..19: mol_type = other RNA
cagccaaattaacttcctg

SEQ ID NO: 9727 - RNA, 19 nt, synthetic construct
  source 1..19: mol_type = other RNA
ccagccaaattaacttcct

SEQ ID NO: 9728 - RNA, 19 nt, synthetic construct
  source 1..19: mol_type = other RNA
gccagccaaattaacttcc

SEQ ID NO: 9729 - RNA, 19 nt, synthetic construct
  source 1..19: mol_type = other RNA
tgccagccaaattaacttc

SEQ ID NO: 9730 - RNA, 19 nt, synthetic construct
  source 1..19: mol_type = other RNA
ttgccagccaaattaactt

SEQ ID NO: 9731 - RNA, 19 nt, synthetic construct
  source 1..19: mol_type = other RNA
tttgccagccaaattaact

SEQ ID NO: 9732 - RNA, 19 nt, synthetic construct
  source 1..19: mol_type = other RNA
ttttgccagccaaattaac

SEQ ID NO: 9733 - RNA, 19 nt, synthetic construct
  source 1..19: mol_type = other RNA
attttgccagccaaattaa

SEQ ID NO: 9734 - RNA, 19 nt, synthetic construct
  source 1..19: mol_type = other RNA
aattttgccagccaaatta

SEQ ID NO: 9735 - RNA, 19 nt, synthetic construct
  source 1..19: mol_type = other RNA
gaattttgccagccaaatt

SEQ ID NO: 9736 - RNA, 19 nt, synthetic construct
  source 1..19: mol_type = other RNA
agaattttgccagccaaat

SEQ ID NO: 9737 - RNA, 19 nt, synthetic construct
  source 1..19: mol_type = other RNA
tagaattttgccagccaaa

SEQ ID NO: 9738 - RNA, 19 nt, synthetic construct
  source 1..19: mol_type = other RNA
ctagaattttgccagccaa

SEQ ID NO: 9739 - RNA, 19 nt, synthetic construct
  source 1..19: mol_type = other RNA
cctagaattttgccagcca

SEQ ID NO: 9740 - RNA, 19 nt, synthetic construct
  source 1..19: mol_type = other RNA
ccctagaattttgccagcc

SEQ ID NO: 9741 - RNA, 19 nt, synthetic construct
  source 1..19: mol_type = other RNA
tccctagaattttgccagc

SEQ ID NO: 9742 - RNA, 19 nt, synthetic construct
  source 1..19: mol_type = other RNA
ttccctagaattttgccag

SEQ ID NO: 9743 - RNA, 19 nt, synthetic construct
  source 1..19: mol_type = other RNA
tttccctagaattttgcca

SEQ ID NO: 9744 - RNA, 19 nt, synthetic construct
  source 1..19: mol_type = other RNA
gtttccctagaattttgcc

SEQ ID NO: 9745 - RNA, 19 nt, synthetic construct
  source 1..19: mol_type = other RNA
agtttccctagaattttgc

SEQ ID NO: 9746 - RNA, 19 nt, synthetic construct
  source 1..19: mol_type = other RNA
aagtttccctagaattttg

SEQ ID NO: 9747 - RNA, 19 nt, synthetic construct
  source 1..19: mol_type = other RNA
caagtttccctagaatttt

SEQ ID NO: 9748 - RNA, 19 nt, synthetic construct
  source 1..19: mol_type = other RNA
ccaagtttccctagaattt

SEQ ID NO: 9749 - RNA, 19 nt, synthetic construct
  source 1..19: mol_type = other RNA
gccaagtttccctagaatt

SEQ ID NO: 9750 - RNA, 19 nt, synthetic construct
  source 1..19: mol_type = other RNA
ggccaagtttccctagaat

SEQ ID NO: 9751 - RNA, 19 nt, synthetic construct
  source 1..19: mol_type = other RNA
tggccaagtttccctagaa

SEQ ID NO: 9752 - RNA, 19 nt, synthetic construct
  source 1..19: mol_type = other RNA
ctggccaagtttccctaga

SEQ ID NO: 9753 - RNA, 19 nt, synthetic construct
  source 1..19: mol_type = other RNA
tctggccaagtttccctag

SEQ ID NO: 9754 - RNA, 19 nt, synthetic construct
  source 1..19: mol_type = other RNA
ttctggccaagtttcccta

SEQ ID NO: 9755 - RNA, 19 nt, synthetic construct
  source 1..19: mol_type = other RNA
tttctggccaagtttccct

SEQ ID NO: 9756 - RNA, 19 nt, synthetic construct
  source 1..19: mol_type = other RNA
ttttctggccaagtttccc

SEQ ID NO: 9757 - RNA, 19 nt, synthetic construct
  source 1..19: mol_type = other RNA
gttttctggccaagtttcc

SEQ ID NO: 9758 - RNA, 19 nt, synthetic construct
  source 1..19: mol_type = other RNA
agttttctggccaagtttc

SEQ ID NO: 9759 - RNA, 19 nt, synthetic construct
  source 1..19: mol_type = other RNA
cagttttctggccaagttt

SEQ ID NO: 9760 - RNA, 19 nt, synthetic construct
  source 1..19: mol_type = other RNA
ccagttttctggccaagtt

SEQ ID NO: 9761 - RNA, 19 nt, synthetic construct
  source 1..19: mol_type = other RNA
accagttttctggccaagt

SEQ ID NO: 9762 - RNA, 19 nt, synthetic construct
  source 1..19: mol_type = other RNA
caccagttttctggccaag

SEQ ID NO: 9763 - RNA, 19 nt, synthetic construct
  source 1..19: mol_type = other RNA
acaccagttttctggccaa

SEQ ID NO: 9764 - RNA, 19 nt, synthetic construct
  source 1..19: mol_type = other RNA
aacaccagttttctggcca

SEQ ID NO: 9765 - RNA, 19 nt, synthetic construct
  source 1..19: mol_type = other RNA
caacaccagttttctggcc

SEQ ID NO: 9766 - RNA, 19 nt, synthetic construct
  source 1..19: mol_type = other RNA
tcaacaccagttttctggc

SEQ ID NO: 9767 - RNA, 19 nt, synthetic construct
  source 1..19: mol_type = other RNA
ttcaacaccagttttctgg

SEQ ID NO: 9768 - RNA, 19 nt, synthetic construct
  source 1..19: mol_type = other RNA
cttcaacaccagttttctg

SEQ ID NO: 9769 - RNA, 19 nt, synthetic construct
  source 1..19: mol_type = other RNA
ccttcaacaccagttttct

SEQ ID NO: 9770 - RNA, 19 nt, synthetic construct
  source 1..19: mol_type = other RNA
gccttcaacaccagttttc

SEQ ID NO: 9771 - RNA, 19 nt, synthetic construct
  source 1..19: mol_type = other RNA
agccttcaacaccagtttt

SEQ ID NO: 9772 - RNA, 19 nt, synthetic construct
  source 1..19: mol_type = other RNA
aagccttcaacaccagttt

SEQ ID NO: 9773 - RNA, 19 nt, synthetic construct
  source 1..19: mol_type = other RNA
aaagccttcaacaccagtt

SEQ ID NO: 9774 - RNA, 19 nt, synthetic construct
  source 1..19: mol_type = other RNA
aaaagccttcaacaccagt

SEQ ID NO: 9775 - RNA, 19 nt, synthetic construct
  source 1..19: mol_type = other RNA
caaaagccttcaacaccag

SEQ ID NO: 9776 - RNA, 19 nt, synthetic construct
  source 1..19: mol_type = other RNA
gcaaaagccttcaacacca

SEQ ID NO: 9777 - RNA, 19 nt, synthetic construct
  source 1..19: mol_type = other RNA
agcaaaagccttcaacacc

SEQ ID NO: 9778 - RNA, 19 nt, synthetic construct
  source 1..19: mol_type = other RNA
gagcaaaagccttcaacac

SEQ ID NO: 9779 - RNA, 19 nt, synthetic construct
  source 1..19: mol_type = other RNA
tgagcaaaagccttcaaca

SEQ ID NO: 9780 - RNA, 19 nt, synthetic construct
  source 1..19: mol_type = other RNA
atgagcaaaagccttcaac

SEQ ID NO: 9781 - RNA, 19 nt, synthetic construct
  source 1..19: mol_type = other RNA
tatgagcaaaagccttcaa

SEQ ID NO: 9782 - RNA, 19 nt, synthetic construct
  source 1..19: mol_type = other RNA
atatgagcaaaagccttca

SEQ ID NO: 9783 - RNA, 19 nt, synthetic construct
  source 1..19: mol_type = other RNA
tatatgagcaaaagccttc

SEQ ID NO: 9784 - RNA, 19 nt, synthetic construct
  source 1..19: mol_type = other RNA
ttatatgagcaaaagcctt

SEQ ID NO: 9785 - RNA, 19 nt, synthetic construct
  source 1..19: mol_type = other RNA
tttatatgagcaaaagcct

SEQ ID NO: 9786 - RNA, 19 nt, synthetic construct
  source 1..19: mol_type = other RNA
gtttatatgagcaaaagcc

SEQ ID NO: 9787 - RNA, 19 nt, synthetic construct
  source 1..19: mol_type = other RNA
tgtttatatgagcaaaagc

SEQ ID NO: 9788 - RNA, 19 nt, synthetic construct
  source 1..19: mol_type = other RNA
ttgtttatatgagcaaaag

SEQ ID NO: 9789 - RNA, 19 nt, synthetic construct
  source 1..19: mol_type = other RNA
cttgtttatatgagcaaaa

SEQ ID NO: 9790 - RNA, 19 nt, synthetic construct
  source 1..19: mol_type = other RNA
acttgtttatatgagcaaa

SEQ ID NO: 9791 - RNA, 19 nt, synthetic construct
  source 1..19: mol_type = other RNA
cacttgtttatatgagcaa

SEQ ID NO: 9792 - RNA, 19 nt, synthetic construct
  source 1..19: mol_type = other RNA
gcacttgtttatatgagca

SEQ ID NO: 9793 - RNA, 19 nt, synthetic construct
  source 1..19: mol_type = other RNA
ggcacttgtttatatgagc

SEQ ID NO: 9794 - RNA, 19 nt, synthetic construct
  source 1..19: mol_type = other RNA
tggcacttgtttatatgag

SEQ ID NO: 9795 - RNA, 19 nt, synthetic construct
  source 1..19: mol_type = other RNA
atggcacttgtttatatga

SEQ ID NO: 9796 - RNA, 19 nt, synthetic construct
  source 1..19: mol_type = other RNA
aatggcacttgtttatatg

SEQ ID NO: 9797 - RNA, 19 nt, synthetic construct
  source 1..19: mol_type = other RNA
caatggcacttgtttatat

SEQ ID NO: 9798 - RNA, 19 nt, synthetic construct
  source 1..19: mol_type = other RNA
tcaatggcacttgtttata

SEQ ID NO: 9799 - RNA, 19 nt, synthetic construct
  source 1..19: mol_type = other RNA
ctcaatggcacttgtttat

SEQ ID NO: 9800 - RNA, 19 nt, synthetic construct
  source 1..19: mol_type = other RNA
actcaatggcacttgttta

SEQ ID NO: 9801 - RNA, 19 nt, synthetic construct
  source 1..19: mol_type = other RNA
aactcaatggcacttgttt

SEQ ID NO: 9802 - RNA, 19 nt, synthetic construct
  source 1..19: mol_type = other RNA
aaactcaatggcacttgtt

SEQ ID NO: 9803 - RNA, 19 nt, synthetic construct
  source 1..19: mol_type = other RNA
gaaactcaatggcacttgt

SEQ ID NO: 9804 - RNA, 19 nt, synthetic construct
  source 1..19: mol_type = other RNA
tgaaactcaatggcacttg

SEQ ID NO: 9805 - RNA, 19 nt, synthetic construct
  source 1..19: mol_type = other RNA
ttgaaactcaatggcactt

SEQ ID NO: 9806 - RNA, 19 nt, synthetic construct
  source 1..19: mol_type = other RNA
tttgaaactcaatggcact

SEQ ID NO: 9807 - RNA, 19 nt, synthetic construct
  source 1..19: mol_type = other RNA
atttgaaactcaatggcac

SEQ ID NO: 9808 - RNA, 19 nt, synthetic construct
  source 1..19: mol_type = other RNA
catttgaaactcaatggca

SEQ ID NO: 9809 - RNA, 19 nt, synthetic construct
  source 1..19: mol_type = other RNA
tcatttgaaactcaatggc

SEQ ID NO: 9810 - RNA, 19 nt, synthetic construct
  source 1..19: mol_type = other RNA
gtcatttgaaactcaatgg

SEQ ID NO: 9811 - RNA, 19 nt, synthetic construct
  source 1..19: mol_type = other RNA
ggtcatttgaaactcaatg

SEQ ID NO: 9812 - RNA, 19 nt, synthetic construct
  source 1..19: mol_type = other RNA
tggtcatttgaaactcaat

SEQ ID NO: 9813 - RNA, 19 nt, synthetic construct
  source 1..19: mol_type = other RNA
ctggtcatttgaaactcaa

SEQ ID NO: 9814 - RNA, 19 nt, synthetic construct
  source 1..19: mol_type = other RNA
gctggtcatttgaaactca

SEQ ID NO: 9815 - RNA, 19 nt, synthetic construct
  source 1..19: mol_type = other RNA
tgctggtcatttgaaactc

SEQ ID NO: 9816 - RNA, 19 nt, synthetic construct
  source 1..19: mol_type = other RNA
ttgctggtcatttgaaact

SEQ ID NO: 9817 - RNA, 19 nt, synthetic construct
  source 1..19: mol_type = other RNA
tttgctggtcatttgaaac

SEQ ID NO: 9818 - RNA, 19 nt, synthetic construct
  source 1..19: mol_type = other RNA
atttgctggtcatttgaaa

SEQ ID NO: 9819 - RNA, 19 nt, synthetic construct
  source 1..19: mol_type = other RNA
tatttgctggtcatttgaa

SEQ ID NO: 9820 - RNA, 19 nt, synthetic construct
  source 1..19: mol_type = other RNA
atatttgctggtcatttga

SEQ ID NO: 9821 - RNA, 19 nt, synthetic construct
  source 1..19: mol_type = other RNA
tatatttgctggtcatttg

SEQ ID NO: 9822 - RNA, 19 nt, synthetic construct
  source 1..19: mol_type = other RNA
atatatttgctggtcattt

SEQ ID NO: 9823 - RNA, 19 nt, synthetic construct
  source 1..19: mol_type = other RNA
aatatatttgctggtcatt

SEQ ID NO: 9824 - RNA, 19 nt, synthetic construct
  source 1..19: mol_type = other RNA
aaatatatttgctggtcat

SEQ ID NO: 9825 - RNA, 19 nt, synthetic construct
  source 1..19: mol_type = other RNA
taaatatatttgctggtca

SEQ ID NO: 9826 - RNA, 19 nt, synthetic construct
  source 1..19: mol_type = other RNA
ctaaatatatttgctggtc

SEQ ID NO: 9827 - RNA, 19 nt, synthetic construct
  source 1..19: mol_type = other RNA
tctaaatatatttgctggt

SEQ ID NO: 9828 - RNA, 19 nt, synthetic construct
  source 1..19: mol_type = other RNA
ttctaaatatatttgctgg

SEQ ID NO: 9829 - RNA, 19 nt, synthetic construct
  source 1..19: mol_type = other RNA
gttctaaatatatttgctg

SEQ ID NO: 9830 - RNA, 19 nt, synthetic construct
  source 1..19: mol_type = other RNA
ggttctaaatatatttgct

SEQ ID NO: 9831 - RNA, 19 nt, synthetic construct
  source 1..19: mol_type = other RNA
gggttctaaatatatttgc

SEQ ID NO: 9832 - RNA, 19 nt, synthetic construct
  source 1..19: mol_type = other RNA
agggttctaaatatatttg

SEQ ID NO: 9833 - RNA, 19 nt, synthetic construct
  source 1..19: mol_type = other RNA
aagggttctaaatatattt

SEQ ID NO: 9834 - RNA, 19 nt, synthetic construct
  source 1..19: mol_type = other RNA
gaagggttctaaatatatt

SEQ ID NO: 9835 - RNA, 19 nt, synthetic construct
  source 1..19: mol_type = other RNA
ggaagggttctaaatatat

SEQ ID NO: 9836 - RNA, 19 nt, synthetic construct
  source 1..19: mol_type = other RNA
aggaagggttctaaatata

SEQ ID NO: 9837 - RNA, 19 nt, synthetic construct
  source 1..19: mol_type = other RNA
caggaagggttctaaatat

SEQ ID NO: 9838 - RNA, 19 nt, synthetic construct
  source 1..19: mol_type = other RNA
acaggaagggttctaaata

SEQ ID NO: 9839 - RNA, 19 nt, synthetic construct
  source 1..19: mol_type = other RNA
aacaggaagggttctaaat

SEQ ID NO: 9840 - RNA, 19 nt, synthetic construct
  source 1..19: mol_type = other RNA
aaacaggaagggttctaaa

SEQ ID NO: 9841 - RNA, 19 nt, synthetic construct
  source 1..19: mol_type = other RNA
aaaacaggaagggttctaa

SEQ ID NO: 9842 - RNA, 19 nt, synthetic construct
  source 1..19: mol_type = other RNA
taaaacaggaagggttcta

SEQ ID NO: 9843 - RNA, 19 nt, synthetic construct
  source 1..19: mol_type = other RNA
ataaaacaggaagggttct

SEQ ID NO: 9844 - RNA, 19 nt, synthetic construct
  source 1..19: mol_type = other RNA
cataaaacaggaagggttc

SEQ ID NO: 9845 - RNA, 19 nt, synthetic construct
  source 1..19: mol_type = other RNA
acataaaacaggaagggtt

SEQ ID NO: 9846 - RNA, 19 nt, synthetic construct
  source 1..19: mol_type = other RNA
gacataaaacaggaagggt

SEQ ID NO: 9847 - RNA, 19 nt, synthetic construct
  source 1..19: mol_type = other RNA
agacataaaacaggaaggg

SEQ ID NO: 9848 - RNA, 19 nt, synthetic construct
  source 1..19: mol_type = other RNA
cagacataaaacaggaagg

SEQ ID NO: 9849 - RNA, 19 nt, synthetic construct
  source 1..19: mol_type = other RNA
acagacataaaacaggaag

SEQ ID NO: 9850 - RNA, 19 nt, synthetic construct
  source 1..19: mol_type = other RNA
tacagacataaaacaggaa

SEQ ID NO: 9851 - RNA, 19 nt, synthetic construct
  source 1..19: mol_type = other RNA
gtacagacataaaacagga

SEQ ID NO: 9852 - RNA, 19 nt, synthetic construct
  source 1..19: mol_type = other RNA
ggtacagacataaaacagg

SEQ ID NO: 9853 - RNA, 19 nt, synthetic construct
  source 1..19: mol_type = other RNA
aggtacagacataaaacag

SEQ ID NO: 9854 - RNA, 19 nt, synthetic construct
  source 1..19: mol_type = other RNA
gaggtacagacataaaaca

SEQ ID NO: 9855 - RNA, 19 nt, synthetic construct
  source 1..19: mol_type = other RNA
cgaggtacagacataaaac

SEQ ID NO: 9856 - RNA, 19 nt, synthetic construct
  source 1..19: mol_type = other RNA
acgaggtacagacataaaa

SEQ ID NO: 9857 - RNA, 19 nt, synthetic construct
  source 1..19: mol_type = other RNA
gacgaggtacagacataaa

SEQ ID NO: 9858 - RNA, 19 nt, synthetic construct
  source 1..19: mol_type = other RNA
ggacgaggtacagacataa

SEQ ID NO: 9859 - RNA, 19 nt, synthetic construct
  source 1..19: mol_type = other RNA
tggacgaggtacagacata

SEQ ID NO: 9860 - RNA, 19 nt, synthetic construct
  source 1..19: mol_type = other RNA
gtggacgaggtacagacat

SEQ ID NO: 9861 - RNA, 19 nt, synthetic construct
  source 1..19: mol_type = other RNA
ggtggacgaggtacagaca

SEQ ID NO: 9862 - RNA, 19 nt, synthetic construct
  source 1..19: mol_type = other RNA
gggtggacgaggtacagac

SEQ ID NO: 9863 - RNA, 19 nt, synthetic construct
  source 1..19: mol_type = other RNA
ggggtggacgaggtacaga

SEQ ID NO: 9864 - RNA, 19 nt, synthetic construct
  source 1..19: mol_type = other RNA
aggggtggacgaggtacag

SEQ ID NO: 9865 - RNA, 19 nt, synthetic construct
  source 1..19: mol_type = other RNA
gaggggtggacgaggtaca

SEQ ID NO: 9866 - RNA, 19 nt, synthetic construct
  source 1..19: mol_type = other RNA
tgaggggtggacgaggtac

SEQ ID NO: 9867 - RNA, 19 nt, synthetic construct
  source 1..19: mol_type = other RNA
ctgaggggtggacgaggta

SEQ ID NO: 9868 - RNA, 19 nt, synthetic construct
  source 1..19: mol_type = other RNA
cctgaggggtggacgaggt

SEQ ID NO: 9869 - RNA, 19 nt, synthetic construct
  source 1..19: mol_type = other RNA
acctgaggggtggacgagg

SEQ ID NO: 9870 - RNA, 19 nt, synthetic construct
  source 1..19: mol_type = other RNA
tacctgaggggtggacgag

SEQ ID NO: 9871 - RNA, 19 nt, synthetic construct
  source 1..19: mol_type = other RNA
ttacctgaggggtggacga

SEQ ID NO: 9872 - RNA, 19 nt, synthetic construct
  source 1..19: mol_type = other RNA
attacctgaggggtggacg

SEQ ID NO: 9873 - RNA, 19 nt, synthetic construct
  source 1..19: mol_type = other RNA
tattacctgaggggtggac

SEQ ID NO: 9874 - RNA, 19 nt, synthetic construct
  source 1..19: mol_type = other RNA
gtattacctgaggggtgga

SEQ ID NO: 9875 - RNA, 19 nt, synthetic construct
  source 1..19: mol_type = other RNA
ggtattacctgaggggtgg

SEQ ID NO: 9876 - RNA, 19 nt, synthetic construct
  source 1..19: mol_type = other RNA
aggtattacctgaggggtg

SEQ ID NO: 9877 - RNA, 19 nt, synthetic construct
  source 1..19: mol_type = other RNA
caggtattacctgaggggt

SEQ ID NO: 9878 - RNA, 19 nt, synthetic construct
  source 1..19: mol_type = other RNA
gcaggtattacctgagggg

SEQ ID NO: 9879 - RNA, 19 nt, synthetic construct
  source 1..19: mol_type = other RNA
ggcaggtattacctgaggg

SEQ ID NO: 9880 - RNA, 19 nt, synthetic construct
  source 1..19: mol_type = other RNA
aggcaggtattacctgagg

SEQ ID NO: 9881 - RNA, 19 nt, synthetic construct
  source 1..19: mol_type = other RNA
gaggcaggtattacctgag

SEQ ID NO: 9882 - RNA, 19 nt, synthetic construct
  source 1..19: mol_type = other RNA
agaggcaggtattacctga

SEQ ID NO: 9883 - RNA, 19 nt, synthetic construct
  source 1..19: mol_type = other RNA
gagaggcaggtattacctg

SEQ ID NO: 9884 - RNA, 19 nt, synthetic construct
  source 1..19: mol_type = other RNA
tgagaggcaggtattacct

SEQ ID NO: 9885 - RNA, 19 nt, synthetic construct
  source 1..19: mol_type = other RNA
gtgagaggcaggtattacc

SEQ ID NO: 9886 - RNA, 19 nt, synthetic construct
  source 1..19: mol_type = other RNA
tgtgagaggcaggtattac

SEQ ID NO: 9887 - RNA, 19 nt, synthetic construct
  source 1..19: mol_type = other RNA
ctgtgagaggcaggtatta

SEQ ID NO: 9888 - RNA, 19 nt, synthetic construct
  source 1..19: mol_type = other RNA
cctgtgagaggcaggtatt

SEQ ID NO: 9889 - RNA, 19 nt, synthetic construct
  source 1..19: mol_type = other RNA
acctgtgagaggcaggtat

SEQ ID NO: 9890 - RNA, 19 nt, synthetic construct
  source 1..19: mol_type = other RNA
tacctgtgagaggcaggta

SEQ ID NO: 9891 - RNA, 19 nt, synthetic construct
  source 1..19: mol_type = other RNA
gtacctgtgagaggcaggt

SEQ ID NO: 9892 - RNA, 19 nt, synthetic construct
  source 1..19: mol_type = other RNA
tgtacctgtgagaggcagg

SEQ ID NO: 9893 - RNA, 19 nt, synthetic construct
  source 1..19: mol_type = other RNA
ctgtacctgtgagaggcag

SEQ ID NO: 9894 - RNA, 19 nt, synthetic construct
  source 1..19: mol_type = other RNA
gctgtacctgtgagaggca

SEQ ID NO: 9895 - RNA, 19 nt, synthetic construct
  source 1..19: mol_type = other RNA
agctgtacctgtgagaggc

SEQ ID NO: 9896 - RNA, 19 nt, synthetic construct
  source 1..19: mol_type = other RNA
cagctgtacctgtgagagg

SEQ ID NO: 9897 - RNA, 19 nt, synthetic construct
  source 1..19: mol_type = other RNA
acagctgtacctgtgagag

SEQ ID NO: 9898 - RNA, 19 nt, synthetic construct
  source 1..19: mol_type = other RNA
aacagctgtacctgtgaga

SEQ ID NO: 9899 - RNA, 19 nt, synthetic construct
  source 1..19: mol_type = other RNA
aaacagctgtacctgtgag

SEQ ID NO: 9900 - RNA, 19 nt, synthetic construct
  source 1..19: mol_type = other RNA
gaaacagctgtacctgtga

SEQ ID NO: 9901 - RNA, 19 nt, synthetic construct
  source 1..19: mol_type = other RNA
agaaacagctgtacctgtg

SEQ ID NO: 9902 - RNA, 19 nt, synthetic construct
  source 1..19: mol_type = other RNA
aagaaacagctgtacctgt

SEQ ID NO: 9903 - RNA, 19 nt, synthetic construct
  source 1..19: mol_type = other RNA
caagaaacagctgtacctg

SEQ ID NO: 9904 - RNA, 19 nt, synthetic construct
  source 1..19: mol_type = other RNA
ccaagaaacagctgtacct

SEQ ID NO: 9905 - RNA, 19 nt, synthetic construct
  source 1..19: mol_type = other RNA
tccaagaaacagctgtacc

SEQ ID NO: 9906 - RNA, 19 nt, synthetic construct
  source 1..19: mol_type = other RNA
ttccaagaaacagctgtac

SEQ ID NO: 9907 - RNA, 19 nt, synthetic construct
  source 1..19: mol_type = other RNA
tttccaagaaacagctgta

SEQ ID NO: 9908 - RNA, 19 nt, synthetic construct
  source 1..19: mol_type = other RNA
atttccaagaaacagctgt

SEQ ID NO: 9909 - RNA, 19 nt, synthetic construct
  source 1..19: mol_type = other RNA
gatttccaagaaacagctg

SEQ ID NO: 9910 - RNA, 19 nt, synthetic construct
  source 1..19: mol_type = other RNA
ggatttccaagaaacagct

SEQ ID NO: 9911 - RNA, 19 nt, synthetic construct
  source 1..19: mol_type = other RNA
aggatttccaagaaacagc

SEQ ID NO: 9912 - RNA, 19 nt, synthetic construct
  source 1..19: mol_type = other RNA
gaggatttccaagaaacag

SEQ ID NO: 9913 - RNA, 19 nt, synthetic construct
  source 1..19: mol_type = other RNA
ggaggatttccaagaaaca

SEQ ID NO: 9914 - RNA, 19 nt, synthetic construct
  source 1..19: mol_type = other RNA
tggaggatttccaagaaac

SEQ ID NO: 9915 - RNA, 19 nt, synthetic construct
  source 1..19: mol_type = other RNA
ttggaggatttccaagaaa

SEQ ID NO: 9916 - RNA, 19 nt, synthetic construct
  source 1..19: mol_type = other RNA
gttggaggatttccaagaa

SEQ ID NO: 9917 - RNA, 19 nt, synthetic construct
  source 1..19: mol_type = other RNA
ggttggaggatttccaaga

SEQ ID NO: 9918 - RNA, 19 nt, synthetic construct
  source 1..19: mol_type = other RNA
tggttggaggatttccaag

SEQ ID NO: 9919 - RNA, 19 nt, synthetic construct
  source 1..19: mol_type = other RNA
ttggttggaggatttccaa

SEQ ID NO: 9920 - RNA, 19 nt, synthetic construct
  source 1..19: mol_type = other RNA
tttggttggaggatttcca

SEQ ID NO: 9921 - RNA, 19 nt, synthetic construct
  source 1..19: mol_type = other RNA
atttggttggaggatttcc

SEQ ID NO: 9922 - RNA, 19 nt, synthetic construct
  source 1..19: mol_type = other RNA
tatttggttggaggatttc

SEQ ID NO: 9923 - RNA, 19 nt, synthetic construct
  source 1..19: mol_type = other RNA
ctatttggttggaggattt

SEQ ID NO: 9924 - RNA, 19 nt, synthetic construct
  source 1..19: mol_type = other RNA
gctatttggttggaggatt

SEQ ID NO: 9925 - RNA, 19 nt, synthetic construct
  source 1..19: mol_type = other RNA
tgctatttggttggaggat

SEQ ID NO: 9926 - RNA, 19 nt, synthetic construct
  source 1..19: mol_type = other RNA
ctgctatttggttggagga

SEQ ID NO: 9927 - RNA, 19 nt, synthetic construct
  source 1..19: mol_type = other RNA
actgctatttggttggagg

SEQ ID NO: 9928 - RNA, 19 nt, synthetic construct
  source 1..19: mol_type = other RNA
aactgctatttggttggag

SEQ ID NO: 9929 - RNA, 19 nt, synthetic construct
  source 1..19: mol_type = other RNA
aaactgctatttggttgga

SEQ ID NO: 9930 - RNA, 19 nt, synthetic construct
  source 1..19: mol_type = other RNA
aaaactgctatttggttgg

SEQ ID NO: 9931 - RNA, 19 nt, synthetic construct
  source 1..19: mol_type = other RNA
gaaaactgctatttggttg

SEQ ID NO: 9932 - RNA, 19 nt, synthetic construct
  source 1..19: mol_type = other RNA
ggaaaactgctatttggtt

SEQ ID NO: 9933 - RNA, 19 nt, synthetic construct
  source 1..19: mol_type = other RNA
aggaaaactgctatttggt

SEQ ID NO: 9934 - RNA, 19 nt, synthetic construct
  source 1..19: mol_type = other RNA
taggaaaactgctatttgg

SEQ ID NO: 9935 - RNA, 19 nt, synthetic construct
  source 1..19: mol_type = other RNA
ttaggaaaactgctatttg

SEQ ID NO: 9936 - RNA, 19 nt, synthetic construct
  source 1..19: mol_type = other RNA
gttaggaaaactgctattt

SEQ ID NO: 9937 - RNA, 19 nt, synthetic construct
  source 1..19: mol_type = other RNA
agttaggaaaactgctatt

SEQ ID NO: 9938 - RNA, 19 nt, synthetic construct
  source 1..19: mol_type = other RNA
aagttaggaaaactgctat

SEQ ID NO: 9939 - RNA, 19 nt, synthetic construct
  source 1..19: mol_type = other RNA
caagttaggaaaactgcta

SEQ ID NO: 9940 - RNA, 19 nt, synthetic construct
  source 1..19: mol_type = other RNA
tcaagttaggaaaactgct

SEQ ID NO: 9941 - RNA, 19 nt, synthetic construct
  source 1..19: mol_type = other RNA
atcaagttaggaaaactgc

SEQ ID NO: 9942 - RNA, 19 nt, synthetic construct
  source 1..19: mol_type = other RNA
aatcaagttaggaaaactg

SEQ ID NO: 9943 - RNA, 19 nt, synthetic construct
  source 1..19: mol_type = other RNA
taatcaagttaggaaaact

SEQ ID NO: 9944 - RNA, 19 nt, synthetic construct
  source 1..19: mol_type = other RNA
ctaatcaagttaggaaaac

SEQ ID NO: 9945 - RNA, 19 nt, synthetic construct
  source 1..19: mol_type = other RNA
gctaatcaagttaggaaaa

SEQ ID NO: 9946 - RNA, 19 nt, synthetic construct
  source 1..19: mol_type = other RNA
agctaatcaagttaggaaa

SEQ ID NO: 9947 - RNA, 19 nt, synthetic construct
  source 1..19: mol_type = other RNA
aagctaatcaagttaggaa

SEQ ID NO: 9948 - RNA, 19 nt, synthetic construct
  source 1..19: mol_type = other RNA
caagctaatcaagttagga

SEQ ID NO: 9949 - RNA, 19 nt, synthetic construct
  source 1..19: mol_type = other RNA
tcaagctaatcaagttagg

SEQ ID NO: 9950 - RNA, 19 nt, synthetic construct
  source 1..19: mol_type = other RNA
ctcaagctaatcaagttag

SEQ ID NO: 9951 - RNA, 19 nt, synthetic construct
  source 1..19: mol_type = other RNA
gctcaagctaatcaagtta

SEQ ID NO: 9952 - RNA, 19 nt, synthetic construct
  source 1..19: mol_type = other RNA
agctcaagctaatcaagtt

SEQ ID NO: 9953 - RNA, 19 nt, synthetic construct
  source 1..19: mol_type = other RNA
cagctcaagctaatcaagt

SEQ ID NO: 9954 - RNA, 19 nt, synthetic construct
  source 1..19: mol_type = other RNA
tcagctcaagctaatcaag

SEQ ID NO: 9955 - RNA, 19 nt, synthetic construct
  source 1..19: mol_type = other RNA
gtcagctcaagctaatcaa

SEQ ID NO: 9956 - RNA, 19 nt, synthetic construct
  source 1..19: mol_type = other RNA
tgtcagctcaagctaatca

SEQ ID NO: 9957 - RNA, 19 nt, synthetic construct
  source 1..19: mol_type = other RNA
ctgtcagctcaagctaatc

SEQ ID NO: 9958 - RNA, 19 nt, synthetic construct
  source 1..19: mol_type = other RNA
tctgtcagctcaagctaat

SEQ ID NO: 9959 - RNA, 19 nt, synthetic construct
  source 1..19: mol_type = other RNA
gtctgtcagctcaagctaa

SEQ ID NO: 9960 - RNA, 19 nt, synthetic construct
  source 1..19: mol_type = other RNA
agtctgtcagctcaagcta

SEQ ID NO: 9961 - RNA, 19 nt, synthetic construct
  source 1..19: mol_type = other RNA
cagtctgtcagctcaagct

SEQ ID NO: 9962 - RNA, 19 nt, synthetic construct
  source 1..19: mol_type = other RNA
acagtctgtcagctcaagc

SEQ ID NO: 9963 - RNA, 19 nt, synthetic construct
  source 1..19: mol_type = other RNA
aacagtctgtcagctcaag

SEQ ID NO: 9964 - RNA, 19 nt, synthetic construct
  source 1..19: mol_type = other RNA
taacagtctgtcagctcaa

SEQ ID NO: 9965 - RNA, 19 nt, synthetic construct
  source 1..19: mol_type = other RNA
ctaacagtctgtcagctca

SEQ ID NO: 9966 - RNA, 19 nt, synthetic construct
  source 1..19: mol_type = other RNA
tctaacagtctgtcagctc

SEQ ID NO: 9967 - RNA, 19 nt, synthetic construct
  source 1..19: mol_type = other RNA
ttctaacagtctgtcagct

SEQ ID NO: 9968 - RNA, 19 nt, synthetic construct
  source 1..19: mol_type = other RNA
attctaacagtctgtcagc

SEQ ID NO: 9969 - RNA, 19 nt, synthetic construct
  source 1..19: mol_type = other RNA
tattctaacagtctgtcag

SEQ ID NO: 9970 - RNA, 19 nt, synthetic construct
  source 1..19: mol_type = other RNA
gtattctaacagtctgtca

SEQ ID NO: 9971 - RNA, 19 nt, synthetic construct
  source 1..19: mol_type = other RNA
tgtattctaacagtctgtc

SEQ ID NO: 9972 - RNA, 19 nt, synthetic construct
  source 1..19: mol_type = other RNA
ctgtattctaacagtctgt

SEQ ID NO: 9973 - RNA, 19 nt, synthetic construct
  source 1..19: mol_type = other RNA
actgtattctaacagtctg

SEQ ID NO: 9974 - RNA, 19 nt, synthetic construct
  source 1..19: mol_type = other RNA
aactgtattctaacagtct

SEQ ID NO: 9975 - RNA, 19 nt, synthetic construct
  source 1..19: mol_type = other RNA
gaactgtattctaacagtc

SEQ ID NO: 9976 - RNA, 19 nt, synthetic construct
  source 1..19: mol_type = other RNA
agaactgtattctaacagt

SEQ ID NO: 9977 - RNA, 19 nt, synthetic construct
  source 1..19: mol_type = other RNA
gagaactgtattctaacag

SEQ ID NO: 9978 - RNA, 19 nt, synthetic construct
  source 1..19: mol_type = other RNA
agagaactgtattctaaca

SEQ ID NO: 9979 - RNA, 19 nt, synthetic construct
  source 1..19: mol_type = other RNA
cagagaactgtattctaac

SEQ ID NO: 9980 - RNA, 19 nt, synthetic construct
  source 1..19: mol_type = other RNA
ccagagaactgtattctaa

SEQ ID NO: 9981 - RNA, 19 nt, synthetic construct
  source 1..19: mol_type = other RNA
gccagagaactgtattcta

SEQ ID NO: 9982 - RNA, 19 nt, synthetic construct
  source 1..19: mol_type = other RNA
ggccagagaactgtattct

SEQ ID NO: 9983 - RNA, 19 nt, synthetic construct
  source 1..19: mol_type = other RNA
tggccagagaactgtattc

SEQ ID NO: 9984 - RNA, 19 nt, synthetic construct
  source 1..19: mol_type = other RNA
gtggccagagaactgtatt

SEQ ID NO: 9985 - RNA, 19 nt, synthetic construct
  source 1..19: mol_type = other RNA
tgtggccagagaactgtat

SEQ ID NO: 9986 - RNA, 19 nt, synthetic construct
  source 1..19: mol_type = other RNA
ctgtggccagagaactgta

SEQ ID NO: 9987 - RNA, 19 nt, synthetic construct
  source 1..19: mol_type = other RNA
gctgtggccagagaactgt

SEQ ID NO: 9988 - RNA, 19 nt, synthetic construct
  source 1..19: mol_type = other RNA
agctgtggccagagaactg

SEQ ID NO: 9989 - RNA, 19 nt, synthetic construct
  source 1..19: mol_type = other RNA
cagctgtggccagagaact

SEQ ID NO: 9990 - RNA, 19 nt, synthetic construct
  source 1..19: mol_type = other RNA
tcagctgtggccagagaac

SEQ ID NO: 9991 - RNA, 19 nt, synthetic construct
  source 1..19: mol_type = other RNA
atcagctgtggccagagaa

SEQ ID NO: 9992 - RNA, 19 nt, synthetic construct
  source 1..19: mol_type = other RNA
catcagctgtggccagaga

SEQ ID NO: 9993 - RNA, 19 nt, synthetic construct
  source 1..19: mol_type = other RNA
tcatcagctgtggccagag

SEQ ID NO: 9994 - RNA, 19 nt, synthetic construct
  source 1..19: mol_type = other RNA
ctcatcagctgtggccaga

SEQ ID NO: 9995 - RNA, 19 nt, synthetic construct
  source 1..19: mol_type = other RNA
cctcatcagctgtggccag

SEQ ID NO: 9996 - RNA, 19 nt, synthetic construct
  source 1..19: mol_type = other RNA
ccctcatcagctgtggcca

SEQ ID NO: 9997 - RNA, 19 nt, synthetic construct
  source 1..19: mol_type = other RNA
gccctcatcagctgtggcc

SEQ ID NO: 9998 - RNA, 19 nt, synthetic construct
  source 1..19: mol_type = other RNA
agccctcatcagctgtggc

SEQ ID NO: 9999 - RNA, 19 nt, synthetic construct
  source 1..19: mol_type = other RNA
aagccctcatcagctgtgg

SEQ ID NO: 10000 - RNA, 19 nt, synthetic construct
  source 1..19: mol_type = other RNA
aaagccctcatcagctgtg

SEQ ID NO: 10001 - RNA, 19 nt, synthetic construct
  source 1..19: mol_type = other RNA
gaaagccctcatcagctgt

SEQ ID NO: 10002 - RNA, 19 nt, synthetic construct
  source 1..19: mol_type = other RNA
agaaagccctcatcagctg

SEQ ID NO: 10003 - RNA, 19 nt, synthetic construct
  source 1..19: mol_type = other RNA
cagaaagccctcatcagct

SEQ ID NO: 10004 - RNA, 19 nt, synthetic construct
  source 1..19: mol_type = other RNA
acagaaagccctcatcagc

SEQ ID NO: 10005 - RNA, 19 nt, synthetic construct
  source 1..19: mol_type = other RNA
tacagaaagccctcatcag

SEQ ID NO: 10006 - RNA, 19 nt, synthetic construct
  source 1..19: mol_type = other RNA
gtacagaaagccctcatca

SEQ ID NO: 10007 - RNA, 19 nt, synthetic construct
  source 1..19: mol_type = other RNA
agtacagaaagccctcatc

SEQ ID NO: 10008 - RNA, 19 nt, synthetic construct
  source 1..19: mol_type = other RNA
cagtacagaaagccctcat

SEQ ID NO: 10009 - RNA, 19 nt, synthetic construct
  source 1..19: mol_type = other RNA
gcagtacagaaagccctca

SEQ ID NO: 10010 - RNA, 19 nt, synthetic construct
  source 1..19: mol_type = other RNA
tgcagtacagaaagccctc

SEQ ID NO: 10011 - RNA, 19 nt, synthetic construct
  source 1..19: mol_type = other RNA
gtgcagtacagaaagccct

SEQ ID NO: 10012 - RNA, 19 nt, synthetic construct
  source 1..19: mol_type = other RNA
tgtgcagtacagaaagccc

SEQ ID NO: 10013 - RNA, 19 nt, synthetic construct
  source 1..19: mol_type = other RNA
gtgtgcagtacagaaagcc

SEQ ID NO: 10014 - RNA, 19 nt, synthetic construct
  source 1..19: mol_type = other RNA
tgtgtgcagtacagaaagc

SEQ ID NO: 10015 - RNA, 19 nt, synthetic construct
  source 1..19: mol_type = other RNA
ctgtgtgcagtacagaaag

SEQ ID NO: 10016 - RNA, 19 nt, synthetic construct
  source 1..19: mol_type = other RNA
tctgtgtgcagtacagaaa

SEQ ID NO: 10017 - RNA, 19 nt, synthetic construct
  source 1..19: mol_type = other RNA
atctgtgtgcagtacagaa

SEQ ID NO: 10018 - RNA, 19 nt, synthetic construct
  source 1..19: mol_type = other RNA
aatctgtgtgcagtacaga

SEQ ID NO: 10019 - RNA, 19 nt, synthetic construct
  source 1..19: mol_type = other RNA
caatctgtgtgcagtacag

SEQ ID NO: 10020 - RNA, 19 nt, synthetic construct
  source 1..19: mol_type = other RNA
acaatctgtgtgcagtaca

SEQ ID NO: 10021 - RNA, 19 nt, synthetic construct
  source 1..19: mol_type = other RNA
cacaatctgtgtgcagtac

SEQ ID NO: 10022 - RNA, 19 nt, synthetic construct
  source 1..19: mol_type = other RNA
acacaatctgtgtgcagta

SEQ ID NO: 10023 - RNA, 19 nt, synthetic construct
  source 1..19: mol_type = other RNA
tacacaatctgtgtgcagt

SEQ ID NO: 10024 - RNA, 19 nt, synthetic construct
  source 1..19: mol_type = other RNA
gtacacaatctgtgtgcag

SEQ ID NO: 10025 - RNA, 19 nt, synthetic construct
  source 1..19: mol_type = other RNA
agtacacaatctgtgtgca

SEQ ID NO: 10026 - RNA, 19 nt, synthetic construct
  source 1..19: mol_type = other RNA
cagtacacaatctgtgtgc

SEQ ID NO: 10027 - RNA, 19 nt, synthetic construct
  source 1..19: mol_type = other RNA
gcagtacacaatctgtgtg

SEQ ID NO: 10028 - RNA, 19 nt, synthetic construct
  source 1..19: mol_type = other RNA
tgcagtacacaatctgtgt

SEQ ID NO: 10029 - RNA, 19 nt, synthetic construct
  source 1..19: mol_type = other RNA
gtgcagtacacaatctgtg

SEQ ID NO: 10030 - RNA, 19 nt, synthetic construct
  source 1..19: mol_type = other RNA
ggtgcagtacacaatctgt

SEQ ID NO: 10031 - RNA, 19 nt, synthetic construct
  source 1..19: mol_type = other RNA
gggtgcagtacacaatctg

SEQ ID NO: 10032 - RNA, 19 nt, synthetic construct
  source 1..19: mol_type = other RNA
ggggtgcagtacacaatct

SEQ ID NO: 10033 - RNA, 19 nt, synthetic construct
  source 1..19: mol_type = other RNA
tggggtgcagtacacaatc

SEQ ID NO: 10034 - RNA, 19 nt, synthetic construct
  source 1..19: mol_type = other RNA
ctggggtgcagtacacaat

SEQ ID NO: 10035 - RNA, 19 nt, synthetic construct
  source 1..19: mol_type = other RNA
actggggtgcagtacacaa

SEQ ID NO: 10036 - RNA, 19 nt, synthetic construct
  source 1..19: mol_type = other RNA
gactggggtgcagtacaca

SEQ ID NO: 10037 - RNA, 19 nt, synthetic construct
  source 1..19: mol_type = other RNA
ggactggggtgcagtacac

SEQ ID NO: 10038 - RNA, 19 nt, synthetic construct
  source 1..19: mol_type = other RNA
tggactggggtgcagtaca

SEQ ID NO: 10039 - RNA, 19 nt, synthetic construct
  source 1..19: mol_type = other RNA
ctggactggggtgcagtac

SEQ ID NO: 10040 - RNA, 19 nt, synthetic construct
  source 1..19: mol_type = other RNA
cctggactggggtgcagta

SEQ ID NO: 10041 - RNA, 19 nt, synthetic construct
  source 1..19: mol_type = other RNA
acctggactggggtgcagt

SEQ ID NO: 10042 - RNA, 19 nt, synthetic construct
  source 1..19: mol_type = other RNA
cacctggactggggtgcag

SEQ ID NO: 10043 - RNA, 19 nt, synthetic construct
  source 1..19: mol_type = other RNA
tcacctggactggggtgca

SEQ ID NO: 10044 - RNA, 19 nt, synthetic construct
  source 1..19: mol_type = other RNA
gtcacctggactggggtgc

SEQ ID NO: 10045 - RNA, 19 nt, synthetic construct
  source 1..19: mol_type = other RNA
agtcacctggactggggtg

SEQ ID NO: 10046 - RNA, 19 nt, synthetic construct
  source 1..19: mol_type = other RNA
cagtcacctggactggggt

SEQ ID NO: 10047 - RNA, 19 nt, synthetic construct
  source 1..19: mol_type = other RNA
ccagtcacctggactgggg

SEQ ID NO: 10048 - RNA, 19 nt, synthetic construct
  source 1..19: mol_type = other RNA
accagtcacctggactggg

SEQ ID NO: 10049 - RNA, 19 nt, synthetic construct
  source 1..19: mol_type = other RNA
taccagtcacctggactgg

SEQ ID NO: 10050 - RNA, 19 nt, synthetic construct
  source 1..19: mol_type = other RNA
gtaccagtcacctggactg

SEQ ID NO: 10051 - RNA, 19 nt, synthetic construct
  source 1..19: mol_type = other RNA
ggtaccagtcacctggact

SEQ ID NO: 10052 - RNA, 19 nt, synthetic construct
  source 1..19: mol_type = other RNA
gggtaccagtcacctggac

SEQ ID NO: 10053 - RNA, 19 nt, synthetic construct
  source 1..19: mol_type = other RNA
tgggtaccagtcacctgga

SEQ ID NO: 10054 - RNA, 19 nt, synthetic construct
  source 1..19: mol_type = other RNA
gtgggtaccagtcacctgg

SEQ ID NO: 10055 - RNA, 19 nt, synthetic construct
  source 1..19: mol_type = other RNA
agtgggtaccagtcacctg

SEQ ID NO: 10056 - RNA, 19 nt, synthetic construct
  source 1..19: mol_type = other RNA
gagtgggtaccagtcacct

SEQ ID NO: 10057 - RNA, 19 nt, synthetic construct
  source 1..19: mol_type = other RNA
cgagtgggtaccagtcacc

SEQ ID NO: 10058 - RNA, 19 nt, synthetic construct
  source 1..19: mol_type = other RNA
tcgagtgggtaccagtcac

SEQ ID NO: 10059 - RNA, 19 nt, synthetic construct
  source 1..19: mol_type = other RNA
ctcgagtgggtaccagtca

SEQ ID NO: 10060 - RNA, 19 nt, synthetic construct
  source 1..19: mol_type = other RNA
actcgagtgggtaccagtc

SEQ ID NO: 10061 - RNA, 19 nt, synthetic construct
  source 1..19: mol_type = other RNA
aactcgagtgggtaccagt

SEQ ID NO: 10062 - RNA, 19 nt, synthetic construct
  source 1..19: mol_type = other RNA
caactcgagtgggtaccag

SEQ ID NO: 10063 - RNA, 19 nt, synthetic construct
  source 1..19: mol_type = other RNA
acaactcgagtgggtacca

SEQ ID NO: 10064 - RNA, 19 nt, synthetic construct
  source 1..19: mol_type = other RNA
cacaactcgagtgggtacc

SEQ ID NO: 10065 - RNA, 19 nt, synthetic construct
  source 1..19: mol_type = other RNA
gcacaactcgagtgggtac

SEQ ID NO: 10066 - RNA, 19 nt, synthetic construct
  source 1..19: mol_type = other RNA
ggcacaactcgagtgggta

SEQ ID NO: 10067 - RNA, 19 nt, synthetic construct
  source 1..19: mol_type = other RNA
cggcacaactcgagtgggt

SEQ ID NO: 10068 - RNA, 19 nt, synthetic construct
  source 1..19: mol_type = other RNA
acggcacaactcgagtggg

SEQ ID NO: 10069 - RNA, 19 nt, synthetic construct
  source 1..19: mol_type = other RNA
cacggcacaactcgagtgg

SEQ ID NO: 10070 - RNA, 19 nt, synthetic construct
  source 1..19: mol_type = other RNA
gcacggcacaactcgagtg

SEQ ID NO: 10071 - RNA, 19 nt, synthetic construct
  source 1..19: mol_type = other RNA
tgcacggcacaactcgagt

SEQ ID NO: 10072 - RNA, 19 nt, synthetic construct
  source 1..19: mol_type = other RNA
gtgcacggcacaactcgag

SEQ ID NO: 10073 - RNA, 19 nt, synthetic construct
  source 1..19: mol_type = other RNA
tgtgcacggcacaactcga

SEQ ID NO: 10074 - RNA, 19 nt, synthetic construct
  source 1..19: mol_type = other RNA
ttgtgcacggcacaactcg

SEQ ID NO: 10075 - RNA, 19 nt, synthetic construct
  source 1..19: mol_type = other RNA
gttgtgcacggcacaactc

SEQ ID NO: 10076 - RNA, 19 nt, synthetic construct
  source 1..19: mol_type = other RNA
ggttgtgcacggcacaact

SEQ ID NO: 10077 - RNA, 19 nt, synthetic construct
  source 1..19: mol_type = other RNA
aggttgtgcacggcacaac

SEQ ID NO: 10078 - RNA, 19 nt, synthetic construct
  source 1..19: mol_type = other RNA
caggttgtgcacggcacaa

SEQ ID NO: 10079 - RNA, 19 nt, synthetic construct
  source 1..19: mol_type = other RNA
acaggttgtgcacggcaca

SEQ ID NO: 10080 - RNA, 19 nt, synthetic construct
  source 1..19: mol_type = other RNA
gacaggttgtgcacggcac

SEQ ID NO: 10081 - RNA, 19 nt, synthetic construct
  source 1..19: mol_type = other RNA
ggacaggttgtgcacggca

SEQ ID NO: 10082 - RNA, 19 nt, synthetic construct
  source 1..19: mol_type = other RNA
tggacaggttgtgcacggc

SEQ ID NO: 10083 - RNA, 19 nt, synthetic construct
  source 1..19: mol_type = other RNA
ctggacaggttgtgcacgg

SEQ ID NO: 10084 - RNA, 19 nt, synthetic construct
  source 1..19: mol_type = other RNA
actggacaggttgtgcacg

SEQ ID NO: 10085 - RNA, 19 nt, synthetic construct
  source 1..19: mol_type = other RNA
tactggacaggttgtgcac

SEQ ID NO: 10086 - RNA, 19 nt, synthetic construct
  source 1..19: mol_type = other RNA
atactggacaggttgtgca

SEQ ID NO: 10087 - RNA, 19 nt, synthetic construct
  source 1..19: mol_type = other RNA
tatactggacaggttgtgc

SEQ ID NO: 10088 - RNA, 19 nt, synthetic construct
  source 1..19: mol_type = other RNA
atatactggacaggttgtg

SEQ ID NO: 10089 - RNA, 19 nt, synthetic construct
  source 1..19: mol_type = other RNA
catatactggacaggttgt

SEQ ID NO: 10090 - RNA, 19 nt, synthetic construct
  source 1..19: mol_type = other RNA
gcatatactggacaggttg

SEQ ID NO: 10091 - RNA, 19 nt, synthetic construct
  source 1..19: mol_type = other RNA
tgcatatactggacaggtt

SEQ ID NO: 10092 - RNA, 19 nt, synthetic construct
  source 1..19: mol_type = other RNA
atgcatatactggacaggt

SEQ ID NO: 10093 - RNA, 19 nt, synthetic construct
  source 1..19: mol_type = other RNA
catgcatatactggacagg

SEQ ID NO: 10094 - RNA, 19 nt, synthetic construct
  source 1..19: mol_type = other RNA
acatgcatatactggacag

SEQ ID NO: 10095 - RNA, 19 nt, synthetic construct
  source 1..19: mol_type = other RNA
cacatgcatatactggaca

SEQ ID NO: 10096 - RNA, 19 nt, synthetic construct
  source 1..19: mol_type = other RNA
ccacatgcatatactggac

SEQ ID NO: 10097 - RNA, 19 nt, synthetic construct
  source 1..19: mol_type = other RNA
accacatgcatatactgga

SEQ ID NO: 10098 - RNA, 19 nt, synthetic construct
  source 1..19: mol_type = other RNA
caccacatgcatatactgg

SEQ ID NO: 10099 - RNA, 19 nt, synthetic construct
  source 1..19: mol_type = other RNA
ccaccacatgcatatactg

SEQ ID NO: 10100 - RNA, 19 nt, synthetic construct
  source 1..19: mol_type = other RNA
gccaccacatgcatatact

SEQ ID NO: 10101 - RNA, 19 nt, synthetic construct
  source 1..19: mol_type = other RNA
ggccaccacatgcatatac

SEQ ID NO: 10102 - RNA, 19 nt, synthetic construct
  source 1..19: mol_type = other RNA
gggccaccacatgcatata

SEQ ID NO: 10103 - RNA, 19 nt, synthetic construct
  source 1..19: mol_type = other RNA
agggccaccacatgcatat

SEQ ID NO: 10104 - RNA, 19 nt, synthetic construct
  source 1..19: mol_type = other RNA
tagggccaccacatgcata

SEQ ID NO: 10105 - RNA, 19 nt, synthetic construct
  source 1..19: mol_type = other RNA
gtagggccaccacatgcat

SEQ ID NO: 10106 - RNA, 19 nt, synthetic construct
  source 1..19: mol_type = other RNA
agtagggccaccacatgca

SEQ ID NO: 10107 - RNA, 19 nt, synthetic construct
  source 1..19: mol_type = other RNA
cagtagggccaccacatgc

SEQ ID NO: 10108 - RNA, 19 nt, synthetic construct
  source 1..19: mol_type = other RNA
tcagtagggccaccacatg

SEQ ID NO: 10109 - RNA, 19 nt, synthetic construct
  source 1..19: mol_type = other RNA
gtcagtagggccaccacat

SEQ ID NO: 10110 - RNA, 19 nt, synthetic construct
  source 1..19: mol_type = other RNA
agtcagtagggccaccaca

SEQ ID NO: 10111 - RNA, 19 nt, synthetic construct
  source 1..19: mol_type = other RNA
cagtcagtagggccaccac

SEQ ID NO: 10112 - RNA, 19 nt, synthetic construct
  source 1..19: mol_type = other RNA
ccagtcagtagggccacca

SEQ ID NO: 10113 - RNA, 19 nt, synthetic construct
  source 1..19: mol_type = other RNA
accagtcagtagggccacc

SEQ ID NO: 10114 - RNA, 19 nt, synthetic construct
  source 1..19: mol_type = other RNA
taccagtcagtagggccac

SEQ ID NO: 10115 - RNA, 19 nt, synthetic construct
  source 1..19: mol_type = other RNA
ttaccagtcagtagggcca

SEQ ID NO: 10116 - RNA, 19 nt, synthetic construct
  source 1..19: mol_type = other RNA
attaccagtcagtagggcc

SEQ ID NO: 10117 - RNA, 19 nt, synthetic construct
  source 1..19: mol_type = other RNA
cattaccagtcagtagggc

SEQ ID NO: 10118 - RNA, 19 nt, synthetic construct
  source 1..19: mol_type = other RNA
ccattaccagtcagtaggg

SEQ ID NO: 10119 - RNA, 19 nt, synthetic construct
  source 1..19: mol_type = other RNA
accattaccagtcagtagg

SEQ ID NO: 10120 - RNA, 19 nt, synthetic construct
  source 1..19: mol_type = other RNA
aaccattaccagtcagtag

SEQ ID NO: 10121 - RNA, 19 nt, synthetic construct
  source 1..19: mol_type = other RNA
taaccattaccagtcagta

SEQ ID NO: 10122 - RNA, 19 nt, synthetic construct
  source 1..19: mol_type = other RNA
ctaaccattaccagtcagt

SEQ ID NO: 10123 - RNA, 19 nt, synthetic construct
  source 1..19: mol_type = other RNA
tctaaccattaccagtcag

SEQ ID NO: 10124 - RNA, 19 nt, synthetic construct
  source 1..19: mol_type = other RNA
ctctaaccattaccagtca

SEQ ID NO: 10125 - RNA, 19 nt, synthetic construct
  source 1..19: mol_type = other RNA
cctctaaccattaccagtc

SEQ ID NO: 10126 - RNA, 19 nt, synthetic construct
  source 1..19: mol_type = other RNA
gcctctaaccattaccagt

SEQ ID NO: 10127 - RNA, 19 nt, synthetic construct
  source 1..19: mol_type = other RNA
tgcctctaaccattaccag

SEQ ID NO: 10128 - RNA, 19 nt, synthetic construct
  source 1..19: mol_type = other RNA
atgcctctaaccattacca

SEQ ID NO: 10129 - RNA, 19 nt, synthetic construct
  source 1..19: mol_type = other RNA
aatgcctctaaccattacc

SEQ ID NO: 10130 - RNA, 19 nt, synthetic construct
  source 1..19: mol_type = other RNA
aaatgcctctaaccattac

SEQ ID NO: 10131 - RNA, 19 nt, synthetic construct
  source 1..19: mol_type = other RNA
taaatgcctctaaccatta

SEQ ID NO: 10132 - RNA, 19 nt, synthetic construct
  source 1..19: mol_type = other RNA
ataaatgcctctaaccatt

SEQ ID NO: 10133 - RNA, 19 nt, synthetic construct
  source 1..19: mol_type = other RNA
cataaatgcctctaaccat

SEQ ID NO: 10134 - RNA, 19 nt, synthetic construct
  source 1..19: mol_type = other RNA
ccataaatgcctctaacca

SEQ ID NO: 10135 - RNA, 19 nt, synthetic construct
  source 1..19: mol_type = other RNA
tccataaatgcctctaacc

SEQ ID NO: 10136 - RNA, 19 nt, synthetic construct
  source 1..19: mol_type = other RNA
atccataaatgcctctaac

SEQ ID NO: 10137 - RNA, 19 nt, synthetic construct
  source 1..19: mol_type = other RNA
aatccataaatgcctctaa

SEQ ID NO: 10138 - RNA, 19 nt, synthetic construct
  source 1..19: mol_type = other RNA
aaatccataaatgcctcta

SEQ ID NO: 10139 - RNA, 19 nt, synthetic construct
  source 1..19: mol_type = other RNA
aaaatccataaatgcctct

SEQ ID NO: 10140 - RNA, 19 nt, synthetic construct
  source 1..19: mol_type = other RNA
aaaaatccataaatgcctc

SEQ ID NO: 10141 - RNA, 19 nt, synthetic construct
  source 1..19: mol_type = other RNA
taaaaatccataaatgcct

SEQ ID NO: 10142 - RNA, 19 nt, synthetic construct
  source 1..19: mol_type = other RNA
ctaaaaatccataaatgcc

SEQ ID NO: 10143 - RNA, 19 nt, synthetic construct
  source 1..19: mol_type = other RNA
gctaaaaatccataaatgc

SEQ ID NO: 10144 - RNA, 19 nt, synthetic construct
  source 1..19: mol_type = other RNA
agctaaaaatccataaatg

SEQ ID NO: 10145 - RNA, 19 nt, synthetic construct
  source 1..19: mol_type = other RNA
aagctaaaaatccataaat

SEQ ID NO: 10146 - RNA, 19 nt, synthetic construct
  source 1..19: mol_type = other RNA
aaagctaaaaatccataaa

SEQ ID NO: 10147 - RNA, 19 nt, synthetic construct
  source 1..19: mol_type = other RNA
caaagctaaaaatccataa

SEQ ID NO: 10148 - RNA, 19 nt, synthetic construct
  source 1..19: mol_type = other RNA
tcaaagctaaaaatccata

SEQ ID NO: 10149 - RNA, 19 nt, synthetic construct
  source 1..19: mol_type = other RNA
ctcaaagctaaaaatccat

SEQ ID NO: 10150 - RNA, 19 nt, synthetic construct
  source 1..19: mol_type = other RNA
cctcaaagctaaaaatcca

SEQ ID NO: 10151 - RNA, 19 nt, synthetic construct
  source 1..19: mol_type = other RNA
tcctcaaagctaaaaatcc

SEQ ID NO: 10152 - RNA, 19 nt, synthetic construct
  source 1..19: mol_type = other RNA
ttcctcaaagctaaaaatc

SEQ ID NO: 10153 - RNA, 19 nt, synthetic construct
  source 1..19: mol_type = other RNA
tttcctcaaagctaaaaat

SEQ ID NO: 10154 - RNA, 19 nt, synthetic construct
  source 1..19: mol_type = other RNA
ttttcctcaaagctaaaaa

SEQ ID NO: 10155 - RNA, 19 nt, synthetic construct
  source 1..19: mol_type = other RNA
tttttcctcaaagctaaaa

SEQ ID NO: 10156 - RNA, 19 nt, synthetic construct
  source 1..19: mol_type = other RNA
gtttttcctcaaagctaaa

SEQ ID NO: 10157 - RNA, 19 nt, synthetic construct
  source 1..19: mol_type = other RNA
ggtttttcctcaaagctaa

SEQ ID NO: 10158 - RNA, 19 nt, synthetic construct
  source 1..19: mol_type = other RNA
tggtttttcctcaaagcta

SEQ ID NO: 10159 - RNA, 19 nt, synthetic construct
  source 1..19: mol_type = other RNA
atggtttttcctcaaagct

SEQ ID NO: 10160 - RNA, 19 nt, synthetic construct
  source 1..19: mol_type = other RNA
catggtttttcctcaaagc

SEQ ID NO: 10161 - RNA, 19 nt, synthetic construct
  source 1..19: mol_type = other RNA
tcatggtttttcctcaaag

SEQ ID NO: 10162 - RNA, 19 nt, synthetic construct
  source 1..19: mol_type = other RNA
gtcatggtttttcctcaaa

SEQ ID NO: 10163 - RNA, 19 nt, synthetic construct
  source 1..19: mol_type = other RNA
agtcatggtttttcctcaa

SEQ ID NO: 10164 - RNA, 19 nt, synthetic construct
  source 1..19: mol_type = other RNA
aagtcatggtttttcctca

SEQ ID NO: 10165 - RNA, 19 nt, synthetic construct
  source 1..19: mol_type = other RNA
aaagtcatggtttttcctc

SEQ ID NO: 10166 - RNA, 19 nt, synthetic construct
  source 1..19: mol_type = other RNA
aaaagtcatggtttttcct

SEQ ID NO: 10167 - RNA, 19 nt, synthetic construct
  source 1..19: mol_type = other RNA
taaaagtcatggtttttcc

SEQ ID NO: 10168 - RNA, 19 nt, synthetic construct
  source 1..19: mol_type = other RNA
ttaaaagtcatggtttttc

SEQ ID NO: 10169 - RNA, 19 nt, synthetic construct
  source 1..19: mol_type = other RNA
gttaaaagtcatggttttt

SEQ ID NO: 10170 - RNA, 19 nt, synthetic construct
  source 1..19: mol_type = other RNA
tgttaaaagtcatggtttt

SEQ ID NO: 10171 - RNA, 19 nt, synthetic construct
  source 1..19: mol_type = other RNA
ttgttaaaagtcatggttt

SEQ ID NO: 10172 - RNA, 19 nt, synthetic construct
  source 1..19: mol_type = other RNA
tttgttaaaagtcatggtt

SEQ ID NO: 10173 - RNA, 19 nt, synthetic construct
  source 1..19: mol_type = other RNA
atttgttaaaagtcatggt

SEQ ID NO: 10174 - RNA, 19 nt, synthetic construct
  source 1..19: mol_type = other RNA
aatttgttaaaagtcatgg

SEQ ID NO: 10175 - RNA, 19 nt, synthetic construct
  source 1..19: mol_type = other RNA
aaatttgttaaaagtcatg

SEQ ID NO: 10176 - RNA, 19 nt, synthetic construct
  source 1..19: mol_type = other RNA
aaaatttgttaaaagtcat

SEQ ID NO: 10177 - RNA, 19 nt, synthetic construct
  source 1..19: mol_type = other RNA
aaaaatttgttaaaagtca

SEQ ID NO: 10178 - RNA, 19 nt, synthetic construct
  source 1..19: mol_type = other RNA
taaaaatttgttaaaagtc

SEQ ID NO: 10179 - RNA, 19 nt, synthetic construct
  source 1..19: mol_type = other RNA
ataaaaatttgttaaaagt

SEQ ID NO: 10180 - RNA, 19 nt, synthetic construct
  source 1..19: mol_type = other RNA
cataaaaatttgttaaaag

SEQ ID NO: 10181 - RNA, 19 nt, synthetic construct
  source 1..19: mol_type = other RNA
ccataaaaatttgttaaaa

SEQ ID NO: 10182 - RNA, 19 nt, synthetic construct
  source 1..19: mol_type = other RNA
cccataaaaatttgttaaa

SEQ ID NO: 10183 - RNA, 19 nt, synthetic construct
  source 1..19: mol_type = other RNA
acccataaaaatttgttaa

SEQ ID NO: 10184 - RNA, 19 nt, synthetic construct
  source 1..19: mol_type = other RNA
aacccataaaaatttgtta

SEQ ID NO: 10185 - RNA, 19 nt, synthetic construct
  source 1..19: mol_type = other RNA
taacccataaaaatttgtt

SEQ ID NO: 10186 - RNA, 19 nt, synthetic construct
  source 1..19: mol_type = other RNA
ataacccataaaaatttgt

SEQ ID NO: 10187 - RNA, 19 nt, synthetic construct
  source 1..19: mol_type = other RNA
tataacccataaaaatttg

SEQ ID NO: 10188 - RNA, 19 nt, synthetic construct
  source 1..19: mol_type = other RNA
atataacccataaaaattt

SEQ ID NO: 10189 - RNA, 19 nt, synthetic construct
  source 1..19: mol_type = other RNA
catataacccataaaaatt

SEQ ID NO: 10190 - RNA, 19 nt, synthetic construct
  source 1..19: mol_type = other RNA
gcatataacccataaaaat

SEQ ID NO: 10191 - RNA, 19 nt, synthetic construct
  source 1..19: mol_type = other RNA
ggcatataacccataaaaa

SEQ ID NO: 10192 - RNA, 19 nt, synthetic construct
  source 1..19: mol_type = other RNA
aggcatataacccataaaa

SEQ ID NO: 10193 - RNA, 19 nt, synthetic construct
  source 1..19: mol_type = other RNA
taggcatataacccataaa

SEQ ID NO: 10194 - RNA, 19 nt, synthetic construct
  source 1..19: mol_type = other RNA
ttaggcatataacccataa

SEQ ID NO: 10195 - RNA, 19 nt, synthetic construct
  source 1..19: mol_type = other RNA
tttaggcatataacccata

SEQ ID NO: 10196 - RNA, 19 nt, synthetic construct
  source 1..19: mol_type = other RNA
gtttaggcatataacccat

SEQ ID NO: 10197 - RNA, 19 nt, synthetic construct
  source 1..19: mol_type = other RNA
ggtttaggcatataaccca

SEQ ID NO: 10198 - RNA, 19 nt, synthetic construct
  source 1..19: mol_type = other RNA
gggtttaggcatataaccc

SEQ ID NO: 10199 - RNA, 19 nt, synthetic construct
  source 1..19: mol_type = other RNA
agggtttaggcatataacc

SEQ ID NO: 10200 - RNA, 19 nt, synthetic construct
  source 1..19: mol_type = other RNA
aagggtttaggcatataac

SEQ ID NO: 10201 - RNA, 19 nt, synthetic construct
  source 1..19: mol_type = other RNA
taagggtttaggcatataa

SEQ ID NO: 10202 - RNA, 19 nt, synthetic construct
  source 1..19: mol_type = other RNA
ataagggtttaggcatata

SEQ ID NO: 10203 - RNA, 19 nt, synthetic construct
  source 1..19: mol_type = other RNA
cataagggtttaggcatat

SEQ ID NO: 10204 - RNA, 19 nt, synthetic construct
  source 1..19: mol_type = other RNA
gcataagggtttaggcata

SEQ ID NO: 10205 - RNA, 19 nt, synthetic construct
  source 1..19: mol_type = other RNA
ggcataagggtttaggcat

SEQ ID NO: 10206 - RNA, 19 nt, synthetic construct
  source 1..19: mol_type = other RNA
tggcataagggtttaggca

SEQ ID NO: 10207 - RNA, 19 nt, synthetic construct
  source 1..19: mol_type = other RNA
gtggcataagggtttaggc

SEQ ID NO: 10208 - RNA, 19 nt, synthetic construct
  source 1..19: mol_type = other RNA
tgtggcataagggtttagg

SEQ ID NO: 10209 - RNA, 19 nt, synthetic construct
  source 1..19: mol_type = other RNA
atgtggcataagggtttag

SEQ ID NO: 10210 - RNA, 19 nt, synthetic construct
  source 1..19: mol_type = other RNA
tatgtggcataagggttta

SEQ ID NO: 10211 - RNA, 19 nt, synthetic construct
  source 1..19: mol_type = other RNA
ctatgtggcataagggttt

SEQ ID NO: 10212 - RNA, 19 nt, synthetic construct
  source 1..19: mol_type = other RNA
actatgtggcataagggtt

SEQ ID NO: 10213 - RNA, 19 nt, synthetic construct
  source 1..19: mol_type = other RNA
cactatgtggcataagggt

SEQ ID NO: 10214 - RNA, 19 nt, synthetic construct
  source 1..19: mol_type = other RNA
ccactatgtggcataaggg

SEQ ID NO: 10215 - RNA, 19 nt, synthetic construct
  source 1..19: mol_type = other RNA
accactatgtggcataagg

SEQ ID NO: 10216 - RNA, 19 nt, synthetic construct
  source 1..19: mol_type = other RNA
taccactatgtggcataag

SEQ ID NO: 10217 - RNA, 19 nt, synthetic construct
  source 1..19: mol_type = other RNA
ttaccactatgtggcataa

SEQ ID NO: 10218 - RNA, 19 nt, synthetic construct
  source 1..19: mol_type = other RNA
tttaccactatgtggcata

SEQ ID NO: 10219 - RNA, 19 nt, synthetic construct
  source 1..19: mol_type = other RNA
atttaccactatgtggcat

SEQ ID NO: 10220 - RNA, 19 nt, synthetic construct
  source 1..19: mol_type = other RNA
tatttaccactatgtggca

SEQ ID NO: 10221 - RNA, 19 nt, synthetic construct
  source 1..19: mol_type = other RNA
ttatttaccactatgtggc

SEQ ID NO: 10222 - RNA, 19 nt, synthetic construct
  source 1..19: mol_type = other RNA
attatttaccactatgtgg

SEQ ID NO: 10223 - RNA, 19 nt, synthetic construct
  source 1..19: mol_type = other RNA
aattatttaccactatgtg

SEQ ID NO: 10224 - RNA, 19 nt, synthetic construct
  source 1..19: mol_type = other RNA
taattatttaccactatgt

SEQ ID NO: 10225 - RNA, 19 nt, synthetic construct
  source 1..19: mol_type = other RNA
ataattatttaccactatg

SEQ ID NO: 10226 - RNA, 19 nt, synthetic construct
  source 1..19: mol_type = other RNA
cataattatttaccactat

SEQ ID NO: 10227 - RNA, 19 nt, synthetic construct
  source 1..19: mol_type = other RNA
tcataattatttaccacta

SEQ ID NO: 10228 - RNA, 19 nt, synthetic construct
  source 1..19: mol_type = other RNA
ttcataattatttaccact

SEQ ID NO: 10229 - RNA, 19 nt, synthetic construct
  source 1..19: mol_type = other RNA
tttcataattatttaccac

SEQ ID NO: 10230 - RNA, 19 nt, synthetic construct
  source 1..19: mol_type = other RNA
ttttcataattatttacca

SEQ ID NO: 10231 - RNA, 19 nt, synthetic construct
  source 1..19: mol_type = other RNA
tttttcataattatttacc

SEQ ID NO: 10232 - RNA, 19 nt, synthetic construct
  source 1..19: mol_type = other RNA
atttttcataattatttac

SEQ ID NO: 10233 - RNA, 19 nt, synthetic construct
  source 1..19: mol_type = other RNA
catttttcataattattta

SEQ ID NO: 10234 - RNA, 19 nt, synthetic construct
  source 1..19: mol_type = other RNA
ccatttttcataattattt

SEQ ID NO: 10235 - RNA, 19 nt, synthetic construct
  source 1..19: mol_type = other RNA
accatttttcataattatt

SEQ ID NO: 10236 - RNA, 19 nt, synthetic construct
  source 1..19: mol_type = other RNA
gaccatttttcataattat

SEQ ID NO: 10237 - RNA, 19 nt, synthetic construct
  source 1..19: mol_type = other RNA
agaccatttttcataatta

SEQ ID NO: 10238 - RNA, 19 nt, synthetic construct
  source 1..19: mol_type = other RNA
cagaccatttttcataatt

SEQ ID NO: 10239 - RNA, 19 nt, synthetic construct
  source 1..19: mol_type = other RNA
acagaccatttttcataat

SEQ ID NO: 10240 - RNA, 19 nt, synthetic construct
  source 1..19: mol_type = other RNA
aacagaccatttttcataa

SEQ ID NO: 10241 - RNA, 19 nt, synthetic construct
  source 1..19: mol_type = other RNA
gaacagaccatttttcata

SEQ ID NO: 10242 - RNA, 19 nt, synthetic construct
  source 1..19: mol_type = other RNA
tgaacagaccatttttcat

SEQ ID NO: 10243 - RNA, 19 nt, synthetic construct
  source 1..19: mol_type = other RNA
atgaacagaccatttttca

SEQ ID NO: 10244 - RNA, 19 nt, synthetic construct
  source 1..19: mol_type = other RNA
tatgaacagaccatttttc

SEQ ID NO: 10245 - RNA, 19 nt, synthetic construct
  source 1..19: mol_type = other RNA
ttatgaacagaccattttt

SEQ ID NO: 10246 - RNA, 19 nt, synthetic construct
  source 1..19: mol_type = other RNA
attatgaacagaccatttt

SEQ ID NO: 10247 - RNA, 19 nt, synthetic construct
  source 1..19: mol_type = other RNA
aattatgaacagaccattt

SEQ ID NO: 10248 - RNA, 19 nt, synthetic construct
  source 1..19: mol_type = other RNA
caattatgaacagaccatt

SEQ ID NO: 10249 - RNA, 19 nt, synthetic construct
  source 1..19: mol_type = other RNA
ccaattatgaacagaccat

SEQ ID NO: 10250 - RNA, 19 nt, synthetic construct
  source 1..19: mol_type = other RNA
accaattatgaacagacca

SEQ ID NO: 10251 - RNA, 19 nt, synthetic construct
  source 1..19: mol_type = other RNA
taccaattatgaacagacc

SEQ ID NO: 10252 - RNA, 19 nt, synthetic construct
  source 1..19: mol_type = other RNA
ctaccaattatgaacagac

SEQ ID NO: 10253 - RNA, 19 nt, synthetic construct
  source 1..19: mol_type = other RNA
cctaccaattatgaacaga

SEQ ID NO: 10254 - RNA, 19 nt, synthetic construct
  source 1..19: mol_type = other RNA
acctaccaattatgaacag

SEQ ID NO: 10255 - RNA, 19 nt, synthetic construct
  source 1..19: mol_type = other RNA
cacctaccaattatgaaca

SEQ ID NO: 10256 - RNA, 19 nt, synthetic construct
  source 1..19: mol_type = other RNA
gcacctaccaattatgaac

SEQ ID NO: 10257 - RNA, 19 nt, synthetic construct
  source 1..19: mol_type = other RNA
ggcacctaccaattatgaa

SEQ ID NO: 10258 - RNA, 19 nt, synthetic construct
  source 1..19: mol_type = other RNA
aggcacctaccaattatga

SEQ ID NO: 10259 - RNA, 19 nt, synthetic construct
  source 1..19: mol_type = other RNA
aaggcacctaccaattatg

SEQ ID NO: 10260 - RNA, 19 nt, synthetic construct
  source 1..19: mol_type = other RNA
aaaggcacctaccaattat

SEQ ID NO: 10261 - RNA, 19 nt, synthetic construct
  source 1..19: mol_type = other RNA
aaaaggcacctaccaatta

SEQ ID NO: 10262 - RNA, 19 nt, synthetic construct
  source 1..19: mol_type = other RNA
caaaaggcacctaccaatt

SEQ ID NO: 10263 - RNA, 19 nt, synthetic construct
  source 1..19: mol_type = other RNA
acaaaaggcacctaccaat

SEQ ID NO: 10264 - RNA, 19 nt, synthetic construct
  source 1..19: mol_type = other RNA
cacaaaaggcacctaccaa

SEQ ID NO: 10265 - RNA, 19 nt, synthetic construct
  source 1..19: mol_type = other RNA
tcacaaaaggcacctacca

SEQ ID NO: 10266 - RNA, 19 nt, synthetic construct
  source 1..19: mol_type = other RNA
ctcacaaaaggcacctacc

SEQ ID NO: 10267 - RNA, 19 nt, synthetic construct
  source 1..19: mol_type = other RNA
gctcacaaaaggcacctac

SEQ ID NO: 10268 - RNA, 19 nt, synthetic construct
  source 1..19: mol_type = other RNA
tgctcacaaaaggcaccta

SEQ ID NO: 10269 - RNA, 19 nt, synthetic construct
  source 1..19: mol_type = other RNA
ctgctcacaaaaggcacct

SEQ ID NO: 10270 - RNA, 19 nt, synthetic construct
  source 1..19: mol_type = other RNA
cctgctcacaaaaggcacc

SEQ ID NO: 10271 - RNA, 19 nt, synthetic construct
  source 1..19: mol_type = other RNA
ccctgctcacaaaaggcac

SEQ ID NO: 10272 - RNA, 19 nt, synthetic construct
  source 1..19: mol_type = other RNA
tccctgctcacaaaaggca

SEQ ID NO: 10273 - RNA, 19 nt, synthetic construct
  source 1..19: mol_type = other RNA
ctccctgctcacaaaaggc

SEQ ID NO: 10274 - RNA, 19 nt, synthetic construct
  source 1..19: mol_type = other RNA
gctccctgctcacaaaagg

SEQ ID NO: 10275 - RNA, 19 nt, synthetic construct
  source 1..19: mol_type = other RNA
tgctccctgctcacaaaag

SEQ ID NO: 10276 - RNA, 19 nt, synthetic construct
  source 1..19: mol_type = other RNA
atgctccctgctcacaaaa

SEQ ID NO: 10277 - RNA, 19 nt, synthetic construct
  source 1..19: mol_type = other RNA
tatgctccctgctcacaaa

SEQ ID NO: 10278 - RNA, 19 nt, synthetic construct
  source 1..19: mol_type = other RNA
ttatgctccctgctcacaa

SEQ ID NO: 10279 - RNA, 19 nt, synthetic construct
  source 1..19: mol_type = other RNA
attatgctccctgctcaca

SEQ ID NO: 10280 - RNA, 19 nt, synthetic construct
  source 1..19: mol_type = other RNA
aattatgctccctgctcac

SEQ ID NO: 10281 - RNA, 19 nt, synthetic construct
  source 1..19: mol_type = other RNA
taattatgctccctgctca

SEQ ID NO: 10282 - RNA, 19 nt, synthetic construct
  source 1..19: mol_type = other RNA
ataattatgctccctgctc

SEQ ID NO: 10283 - RNA, 19 nt, synthetic construct
  source 1..19: mol_type = other RNA
aataattatgctccctgct

SEQ ID NO: 10284 - RNA, 19 nt, synthetic construct
  source 1..19: mol_type = other RNA
caataattatgctccctgc

SEQ ID NO: 10285 - RNA, 19 nt, synthetic construct
  source 1..19: mol_type = other RNA
ccaataattatgctccctg

SEQ ID NO: 10286 - RNA, 19 nt, synthetic construct
  source 1..19: mol_type = other RNA
accaataattatgctccct

SEQ ID NO: 10287 - RNA, 19 nt, synthetic construct
  source 1..19: mol_type = other RNA
aaccaataattatgctccc

SEQ ID NO: 10288 - RNA, 19 nt, synthetic construct
  source 1..19: mol_type = other RNA
aaaccaataattatgctcc

SEQ ID NO: 10289 - RNA, 19 nt, synthetic construct
  source 1..19: mol_type = other RNA
taaaccaataattatgctc

SEQ ID NO: 10290 - RNA, 19 nt, synthetic construct
  source 1..19: mol_type = other RNA
ataaaccaataattatgct

SEQ ID NO: 10291 - RNA, 19 nt, synthetic construct
  source 1..19: mol_type = other RNA
aataaaccaataattatgc

SEQ ID NO: 10292 - RNA, 19 nt, synthetic construct
  source 1..19: mol_type = other RNA
taataaaccaataattatg

SEQ ID NO: 10293 - RNA, 19 nt, synthetic construct
  source 1..19: mol_type = other RNA
ataataaaccaataattat

SEQ ID NO: 10294 - RNA, 19 nt, synthetic construct
  source 1..19: mol_type = other RNA
cataataaaccaataatta

SEQ ID NO: 10295 - RNA, 19 nt, synthetic construct
  source 1..19: mol_type = other RNA
ccataataaaccaataatt

SEQ ID NO: 10296 - RNA, 19 nt, synthetic construct
  source 1..19: mol_type = other RNA
accataataaaccaataat

SEQ ID NO: 10297 - RNA, 19 nt, synthetic construct
  source 1..19: mol_type = other RNA
taccataataaaccaataa

SEQ ID NO: 10298 - RNA, 19 nt, synthetic construct
  source 1..19: mol_type = other RNA
ttaccataataaaccaata

SEQ ID NO: 10299 - RNA, 19 nt, synthetic construct
  source 1..19: mol_type = other RNA
attaccataataaaccaat

SEQ ID NO: 10300 - RNA, 19 nt, synthetic construct
  source 1..19: mol_type = other RNA
aattaccataataaaccaa

SEQ ID NO: 10301 - RNA, 19 nt, synthetic construct
  source 1..19: mol_type = other RNA
taattaccataataaacca

SEQ ID NO: 10302 - RNA, 19 nt, synthetic construct
  source 1..19: mol_type = other RNA
ataattaccataataaacc

SEQ ID NO: 10303 - RNA, 19 nt, synthetic construct
  source 1..19: mol_type = other RNA
cataattaccataataaac

SEQ ID NO: 10304 - RNA, 19 nt, synthetic construct
  source 1..19: mol_type = other RNA
ccataattaccataataaa

SEQ ID NO: 10305 - RNA, 19 nt, synthetic construct
  source 1..19: mol_type = other RNA
accataattaccataataa

SEQ ID NO: 10306 - RNA, 19 nt, synthetic construct
  source 1..19: mol_type = other RNA
caccataattaccataata

SEQ ID NO: 10307 - RNA, 19 nt, synthetic construct
  source 1..19: mol_type = other RNA
tcaccataattaccataat

SEQ ID NO: 10308 - RNA, 19 nt, synthetic construct
  source 1..19: mol_type = other RNA
atcaccataattaccataa

SEQ ID NO: 10309 - RNA, 19 nt, synthetic construct
  source 1..19: mol_type = other RNA
aatcaccataattaccata

SEQ ID NO: 10310 - RNA, 19 nt, synthetic construct
  source 1..19: mol_type = other RNA
aaatcaccataattaccat

SEQ ID NO: 10311 - RNA, 19 nt, synthetic construct
  source 1..19: mol_type = other RNA
aaaatcaccataattacca

SEQ ID NO: 10312 - RNA, 19 nt, synthetic construct
  source 1..19: mol_type = other RNA
aaaaatcaccataattacc

SEQ ID NO: 10313 - RNA, 19 nt, synthetic construct
  source 1..19: mol_type = other RNA
aaaaaatcaccataattac

SEQ ID NO: 10314 - RNA, 19 nt, synthetic construct
  source 1..19: mol_type = other RNA
taaaaaatcaccataatta

SEQ ID NO: 10315 - RNA, 19 nt, synthetic construct
  source 1..19: mol_type = other RNA
ttaaaaaatcaccataatt

SEQ ID NO: 10316 - RNA, 19 nt, synthetic construct
  source 1..19: mol_type = other RNA
tttaaaaaatcaccataat

SEQ ID NO: 10317 - RNA, 19 nt, synthetic construct
  source 1..19: mol_type = other RNA
atttaaaaaatcaccataa

SEQ ID NO: 10318 - RNA, 19 nt, synthetic construct
  source 1..19: mol_type = other RNA
tatttaaaaaatcaccata

SEQ ID NO: 10319 - RNA, 19 nt, synthetic construct
  source 1..19: mol_type = other RNA
atatttaaaaaatcaccat

SEQ ID NO: 10320 - RNA, 19 nt, synthetic construct
  source 1..19: mol_type = other RNA
gatatttaaaaaatcacca

SEQ ID NO: 10321 - RNA, 19 nt, synthetic construct
  source 1..19: mol_type = other RNA
tgatatttaaaaaatcacc

SEQ ID NO: 10322 - RNA, 19 nt, synthetic construct
  source 1..19: mol_type = other RNA
atgatatttaaaaaatcac

SEQ ID NO: 10323 - RNA, 19 nt, synthetic construct
  source 1..19: mol_type = other RNA
catgatatttaaaaaatca

SEQ ID NO: 10324 - RNA, 19 nt, synthetic construct
  source 1..19: mol_type = other RNA
acatgatatttaaaaaatc

SEQ ID NO: 10325 - RNA, 19 nt, synthetic construct
  source 1..19: mol_type = other RNA
tacatgatatttaaaaaat

SEQ ID NO: 10326 - RNA, 19 nt, synthetic construct
  source 1..19: mol_type = other RNA
ttacatgatatttaaaaaa

SEQ ID NO: 10327 - RNA, 19 nt, synthetic construct
  source 1..19: mol_type = other RNA
attacatgatatttaaaaa

SEQ ID NO: 10328 - RNA, 19 nt, synthetic construct
  source 1..19: mol_type = other RNA
cattacatgatatttaaaa

SEQ ID NO: 10329 - RNA, 19 nt, synthetic construct
  source 1..19: mol_type = other RNA
acattacatgatatttaaa

SEQ ID NO: 10330 - RNA, 19 nt, synthetic construct
  source 1..19: mol_type = other RNA
aacattacatgatatttaa

SEQ ID NO: 10331 - RNA, 19 nt, synthetic construct
  source 1..19: mol_type = other RNA
taacattacatgatattta

SEQ ID NO: 10332 - RNA, 19 nt, synthetic construct
  source 1..19: mol_type = other RNA
ttaacattacatgatattt

SEQ ID NO: 10333 - RNA, 19 nt, synthetic construct
  source 1..19: mol_type = other RNA
tttaacattacatgatatt

SEQ ID NO: 10334 - RNA, 19 nt, synthetic construct
  source 1..19: mol_type = other RNA
ttttaacattacatgatat

SEQ ID NO: 10335 - RNA, 19 nt, synthetic construct
  source 1..19: mol_type = other RNA
gttttaacattacatgata

SEQ ID NO: 10336 - RNA, 19 nt, synthetic construct
  source 1..19: mol_type = other RNA
cgttttaacattacatgat

SEQ ID NO: 10337 - RNA, 19 nt, synthetic construct
  source 1..19: mol_type = other RNA
acgttttaacattacatga

SEQ ID NO: 10338 - RNA, 19 nt, synthetic construct
  source 1..19: mol_type = other RNA
aacgttttaacattacatg

SEQ ID NO: 10339 - RNA, 19 nt, synthetic construct
  source 1..19: mol_type = other RNA
aaacgttttaacattacat

SEQ ID NO: 10340 - RNA, 19 nt, synthetic construct
  source 1..19: mol_type = other RNA
aaaacgttttaacattaca

SEQ ID NO: 10341 - RNA, 19 nt, synthetic construct
  source 1..19: mol_type = other RNA
gaaaacgttttaacattac

SEQ ID NO: 10342 - RNA, 19 nt, synthetic construct
  source 1..19: mol_type = other RNA
agaaaacgttttaacatta

SEQ ID NO: 10343 - RNA, 19 nt, synthetic construct
  source 1..19: mol_type = other RNA
tagaaaacgttttaacatt

SEQ ID NO: 10344 - RNA, 19 nt, synthetic construct
  source 1..19: mol_type = other RNA
ttagaaaacgttttaacat

SEQ ID NO: 10345 - RNA, 19 nt, synthetic construct
  source 1..19: mol_type = other RNA
gttagaaaacgttttaaca

SEQ ID NO: 10346 - RNA, 19 nt, synthetic construct
  source 1..19: mol_type = other RNA
tgttagaaaacgttttaac

SEQ ID NO: 10347 - RNA, 19 nt, synthetic construct
  source 1..19: mol_type = other RNA
ctgttagaaaacgttttaa

SEQ ID NO: 10348 - RNA, 19 nt, synthetic construct
  source 1..19: mol_type = other RNA
actgttagaaaacgtttta

SEQ ID NO: 10349 - RNA, 19 nt, synthetic construct
  source 1..19: mol_type = other RNA
aactgttagaaaacgtttt

SEQ ID NO: 10350 - RNA, 19 nt, synthetic construct
  source 1..19: mol_type = other RNA
aaactgttagaaaacgttt

SEQ ID NO: 10351 - RNA, 19 nt, synthetic construct
  source 1..19: mol_type = other RNA
taaactgttagaaaacgtt

SEQ ID NO: 10352 - RNA, 19 nt, synthetic construct
  source 1..19: mol_type = other RNA
gtaaactgttagaaaacgt

SEQ ID NO: 10353 - RNA, 19 nt, synthetic construct
  source 1..19: mol_type = other RNA
agtaaactgttagaaaacg

SEQ ID NO: 10354 - RNA, 19 nt, synthetic construct
  source 1..19: mol_type = other RNA
cagtaaactgttagaaaac

SEQ ID NO: 10355 - RNA, 19 nt, synthetic construct
  source 1..19: mol_type = other RNA
acagtaaactgttagaaaa

SEQ ID NO: 10356 - RNA, 19 nt, synthetic construct
  source 1..19: mol_type = other RNA
aacagtaaactgttagaaa

SEQ ID NO: 10357 - RNA, 19 nt, synthetic construct
  source 1..19: mol_type = other RNA
caacagtaaactgttagaa

SEQ ID NO: 10358 - RNA, 19 nt, synthetic construct
  source 1..19: mol_type = other RNA
gcaacagtaaactgttaga

SEQ ID NO: 10359 - RNA, 19 nt, synthetic construct
  source 1..19: mol_type = other RNA
agcaacagtaaactgttag

SEQ ID NO: 10360 - RNA, 19 nt, synthetic construct
  source 1..19: mol_type = other RNA
aagcaacagtaaactgtta

SEQ ID NO: 10361 - RNA, 19 nt, synthetic construct
  source 1..19: mol_type = other RNA
taagcaacagtaaactgtt

SEQ ID NO: 10362 - RNA, 19 nt, synthetic construct
  source 1..19: mol_type = other RNA
ataagcaacagtaaactgt

SEQ ID NO: 10363 - RNA, 19 nt, synthetic construct
  source 1..19: mol_type = other RNA
gataagcaacagtaaactg

SEQ ID NO: 10364 - RNA, 19 nt, synthetic construct
  source 1..19: mol_type = other RNA
agataagcaacagtaaact

SEQ ID NO: 10365 - RNA, 19 nt, synthetic construct
  source 1..19: mol_type = other RNA
gagataagcaacagtaaac

SEQ ID NO: 10366 - RNA, 19 nt, synthetic construct
  source 1..19: mol_type = other RNA
ggagataagcaacagtaaa

SEQ ID NO: 10367 - RNA, 19 nt, synthetic construct
  source 1..19: mol_type = other RNA
tggagataagcaacagtaa

SEQ ID NO: 10368 - RNA, 19 nt, synthetic construct
  source 1..19: mol_type = other RNA
ttggagataagcaacagta

SEQ ID NO: 10369 - RNA, 19 nt, synthetic construct
  source 1..19: mol_type = other RNA
cttggagataagcaacagt

SEQ ID NO: 10370 - RNA, 19 nt, synthetic construct
  source 1..19: mol_type = other RNA
tcttggagataagcaacag

SEQ ID NO: 10371 - RNA, 19 nt, synthetic construct
  source 1..19: mol_type = other RNA
atcttggagataagcaaca

SEQ ID NO: 10372 - RNA, 19 nt, synthetic construct
  source 1..19: mol_type = other RNA
tatcttggagataagcaac

SEQ ID NO: 10373 - RNA, 19 nt, synthetic construct
  source 1..19: mol_type = other RNA
atatcttggagataagcaa

SEQ ID NO: 10374 - RNA, 19 nt, synthetic construct
  source 1..19: mol_type = other RNA
aatatcttggagataagca

SEQ ID NO: 10375 - RNA, 19 nt, synthetic construct
  source 1..19: mol_type = other RNA
taatatcttggagataagc

SEQ ID NO: 10376 - RNA, 19 nt, synthetic construct
  source 1..19: mol_type = other RNA
ataatatcttggagataag

SEQ ID NO: 10377 - RNA, 19 nt, synthetic construct
  source 1..19: mol_type = other RNA
cataatatcttggagataa

SEQ ID NO: 10378 - RNA, 19 nt, synthetic construct
  source 1..19: mol_type = other RNA
ccataatatcttggagata

SEQ ID NO: 10379 - RNA, 19 nt, synthetic construct
  source 1..19: mol_type = other RNA
tccataatatcttggagat

SEQ ID NO: 10380 - RNA, 19 nt, synthetic construct
  source 1..19: mol_type = other RNA
ttccataatatcttggaga

SEQ ID NO: 10381 - RNA, 19 nt, synthetic construct
  source 1..19: mol_type = other RNA
attccataatatcttggag

SEQ ID NO: 10382 - RNA, 19 nt, synthetic construct
  source 1..19: mol_type = other RNA
aattccataatatcttgga

SEQ ID NO: 10383 - RNA, 19 nt, synthetic construct
  source 1..19: mol_type = other RNA
taattccataatatcttgg

SEQ ID NO: 10384 - RNA, 19 nt, synthetic construct
  source 1..19: mol_type = other RNA
ttaattccataatatcttg

SEQ ID NO: 10385 - RNA, 19 nt, synthetic construct
  source 1..19: mol_type = other RNA
cttaattccataatatctt

SEQ ID NO: 10386 - RNA, 19 nt, synthetic construct
  source 1..19: mol_type = other RNA
tcttaattccataatatct

SEQ ID NO: 10387 - RNA, 19 nt, synthetic construct
  source 1..19: mol_type = other RNA
ttcttaattccataatatc

SEQ ID NO: 10388 - RNA, 19 nt, synthetic construct
  source 1..19: mol_type = other RNA
attcttaattccataatat

SEQ ID NO: 10389 - RNA, 19 nt, synthetic construct
  source 1..19: mol_type = other RNA
aattcttaattccataata

SEQ ID NO: 10390 - RNA, 19 nt, synthetic construct
  source 1..19: mol_type = other RNA
aaattcttaattccataat

SEQ ID NO: 10391 - RNA, 19 nt, synthetic construct
  source 1..19: mol_type = other RNA
aaaattcttaattccataa

SEQ ID NO: 10392 - RNA, 19 nt, synthetic construct
  source 1..19: mol_type = other RNA
aaaaattcttaattccata

SEQ ID NO: 10393 - RNA, 19 nt, synthetic construct
  source 1..19: mol_type = other RNA
gaaaaattcttaattccat

SEQ ID NO: 10394 - RNA, 19 nt, synthetic construct
  source 1..19: mol_type = other RNA
ggaaaaattcttaattcca

SEQ ID NO: 10395 - RNA, 19 nt, synthetic construct
  source 1..19: mol_type = other RNA
tggaaaaattcttaattcc

SEQ ID NO: 10396 - RNA, 19 nt, synthetic construct
  source 1..19: mol_type = other RNA
ctggaaaaattcttaattc

SEQ ID NO: 10397 - RNA, 19 nt, synthetic construct
  source 1..19: mol_type = other RNA
tctggaaaaattcttaatt

SEQ ID NO: 10398 - RNA, 19 nt, synthetic construct
  source 1..19: mol_type = other RNA
atctggaaaaattcttaat

SEQ ID NO: 10399 - RNA, 19 nt, synthetic construct
  source 1..19: mol_type = other RNA
catctggaaaaattcttaa

SEQ ID NO: 10400 - RNA, 19 nt, synthetic construct
  source 1..19: mol_type = other RNA
tcatctggaaaaattctta

SEQ ID NO: 10401 - RNA, 19 nt, synthetic construct
  source 1..19: mol_type = other RNA
ctcatctggaaaaattctt

SEQ ID NO: 10402 - RNA, 19 nt, synthetic construct
  source 1..19: mol_type = other RNA
actcatctggaaaaattct

SEQ ID NO: 10403 - RNA, 19 nt, synthetic construct
  source 1..19: mol_type = other RNA
cactcatctggaaaaattc

SEQ ID NO: 10404 - RNA, 19 nt, synthetic construct
  source 1..19: mol_type = other RNA
acactcatctggaaaaatt

SEQ ID NO: 10405 - RNA, 19 nt, synthetic construct
  source 1..19: mol_type = other RNA
aacactcatctggaaaaat

SEQ ID NO: 10406 - RNA, 19 nt, synthetic construct
  source 1..19: mol_type = other RNA
taacactcatctggaaaaa

SEQ ID NO: 10407 - RNA, 19 nt, synthetic construct
  source 1..19: mol_type = other RNA
gtaacactcatctggaaaa

SEQ ID NO: 10408 - RNA, 19 nt, synthetic construct
  source 1..19: mol_type = other RNA
tgtaacactcatctggaaa

SEQ ID NO: 10409 - RNA, 19 nt, synthetic construct
  source 1..19: mol_type = other RNA
atgtaacactcatctggaa

SEQ ID NO: 10410 - RNA, 19 nt, synthetic construct
  source 1..19: mol_type = other RNA
tatgtaacactcatctgga

SEQ ID NO: 10411 - RNA, 19 nt, synthetic construct
  source 1..19: mol_type = other RNA
ctatgtaacactcatctgg

SEQ ID NO: 10412 - RNA, 19 nt, synthetic construct
  source 1..19: mol_type = other RNA
tctatgtaacactcatctg

SEQ ID NO: 10413 - RNA, 19 nt, synthetic construct
  source 1..19: mol_type = other RNA
atctatgtaacactcatct

SEQ ID NO: 10414 - RNA, 19 nt, synthetic construct
  source 1..19: mol_type = other RNA
aatctatgtaacactcatc

SEQ ID NO: 10415 - RNA, 19 nt, synthetic construct
  source 1..19: mol_type = other RNA
gaatctatgtaacactcat

SEQ ID NO: 10416 - RNA, 19 nt, synthetic construct
  source 1..19: mol_type = other RNA
agaatctatgtaacactca

SEQ ID NO: 10417 - RNA, 19 nt, synthetic construct
  source 1..19: mol_type = other RNA
aagaatctatgtaacactc

SEQ ID NO: 10418 - RNA, 19 nt, synthetic construct
  source 1..19: mol_type = other RNA
aaagaatctatgtaacact

SEQ ID NO: 10419 - RNA, 19 nt, synthetic construct
  source 1..19: mol_type = other RNA
caaagaatctatgtaacac

SEQ ID NO: 10420 - RNA, 19 nt, synthetic construct
  source 1..19: mol_type = other RNA
tcaaagaatctatgtaaca

SEQ ID NO: 10421 - RNA, 19 nt, synthetic construct
  source 1..19: mol_type = other RNA
ttcaaagaatctatgtaac

SEQ ID NO: 10422 - RNA, 19 nt, synthetic construct
  source 1..19: mol_type = other RNA
attcaaagaatctatgtaa

SEQ ID NO: 10423 - RNA, 19 nt, synthetic construct
  source 1..19: mol_type = other RNA
aattcaaagaatctatgta

SEQ ID NO: 10424 - RNA, 19 nt, synthetic construct
  source 1..19: mol_type = other RNA
aaattcaaagaatctatgt

SEQ ID NO: 10425 - RNA, 19 nt, synthetic construct
  source 1..19: mol_type = other RNA
taaattcaaagaatctatg

SEQ ID NO: 10426 - RNA, 19 nt, synthetic construct
  source 1..19: mol_type = other RNA
ctaaattcaaagaatctat

SEQ ID NO: 10427 - RNA, 19 nt, synthetic construct
  source 1..19: mol_type = other RNA
actaaattcaaagaatcta

SEQ ID NO: 10428 - RNA, 19 nt, synthetic construct
  source 1..19: mol_type = other RNA
tactaaattcaaagaatct

SEQ ID NO: 10429 - RNA, 19 nt, synthetic construct
  source 1..19: mol_type = other RNA
atactaaattcaaagaatc

SEQ ID NO: 10430 - RNA, 19 nt, synthetic construct
  source 1..19: mol_type = other RNA
tatactaaattcaaagaat

SEQ ID NO: 10431 - RNA, 19 nt, synthetic construct
  source 1..19: mol_type = other RNA
ttatactaaattcaaagaa

SEQ ID NO: 10432 - RNA, 19 nt, synthetic construct
  source 1..19: mol_type = other RNA
tttatactaaattcaaaga

SEQ ID NO: 10433 - RNA, 19 nt, synthetic construct
  source 1..19: mol_type = other RNA
ttttatactaaattcaaag

SEQ ID NO: 10434 - RNA, 19 nt, synthetic construct
  source 1..19: mol_type = other RNA
cttttatactaaattcaaa

SEQ ID NO: 10435 - RNA, 19 nt, synthetic construct
  source 1..19: mol_type = other RNA
acttttatactaaattcaa

SEQ ID NO: 10436 - RNA, 19 nt, synthetic construct
  source 1..19: mol_type = other RNA
tacttttatactaaattca

SEQ ID NO: 10437 - RNA, 19 nt, synthetic construct
  source 1..19: mol_type = other RNA
gtacttttatactaaattc

SEQ ID NO: 10438 - RNA, 19 nt, synthetic construct
  source 1..19: mol_type = other RNA
agtacttttatactaaatt

SEQ ID NO: 10439 - RNA, 19 nt, synthetic construct
  source 1..19: mol_type = other RNA
cagtacttttatactaaat

SEQ ID NO: 10440 - RNA, 19 nt, synthetic construct
  source 1..19: mol_type = other RNA
tcagtacttttatactaaa

SEQ ID NO: 10441 - RNA, 19 nt, synthetic construct
  source 1..19: mol_type = other RNA
ctcagtacttttatactaa

SEQ ID NO: 10442 - RNA, 19 nt, synthetic construct
  source 1..19: mol_type = other RNA
tctcagtacttttatacta

SEQ ID NO: 10443 - RNA, 19 nt, synthetic construct
  source 1..19: mol_type = other RNA
ttctcagtacttttatact

SEQ ID NO: 10444 - RNA, 19 nt, synthetic construct
  source 1..19: mol_type = other RNA
attctcagtacttttatac

SEQ ID NO: 10445 - RNA, 19 nt, synthetic construct
  source 1..19: mol_type = other RNA
aattctcagtacttttata

SEQ ID NO: 10446 - RNA, 19 nt, synthetic construct
  source 1..19: mol_type = other RNA
taattctcagtacttttat

SEQ ID NO: 10447 - RNA, 19 nt, synthetic construct
  source 1..19: mol_type = other RNA
ttaattctcagtactttta

SEQ ID NO: 10448 - RNA, 19 nt, synthetic construct
  source 1..19: mol_type = other RNA
cttaattctcagtactttt

SEQ ID NO: 10449 - RNA, 19 nt, synthetic construct
  source 1..19: mol_type = other RNA
acttaattctcagtacttt

SEQ ID NO: 10450 - RNA, 19 nt, synthetic construct
  source 1..19: mol_type = other RNA
aacttaattctcagtactt

SEQ ID NO: 10451 - RNA, 19 nt, synthetic construct
  source 1..19: mol_type = other RNA
aaacttaattctcagtact

SEQ ID NO: 10452 - RNA, 19 nt, synthetic construct
  source 1..19: mol_type = other RNA
caaacttaattctcagtac

SEQ ID NO: 10453 - RNA, 19 nt, synthetic construct
  source 1..19: mol_type = other RNA
acaaacttaattctcagta

SEQ ID NO: 10454 - RNA, 19 nt, synthetic construct
  source 1..19: mol_type = other RNA
tacaaacttaattctcagt

SEQ ID NO: 10455 - RNA, 19 nt, synthetic construct
  source 1..19: mol_type = other RNA
gtacaaacttaattctcag

SEQ ID NO: 10456 - RNA, 19 nt, synthetic construct
  source 1..19: mol_type = other RNA
agtacaaacttaattctca

SEQ ID NO: 10457 - RNA, 19 nt, synthetic construct
  source 1..19: mol_type = other RNA
aagtacaaacttaattctc

SEQ ID NO: 10458 - RNA, 19 nt, synthetic construct
  source 1..19: mol_type = other RNA
gaagtacaaacttaattct

SEQ ID NO: 10459 - RNA, 19 nt, synthetic construct
  source 1..19: mol_type = other RNA
ggaagtacaaacttaattc

SEQ ID NO: 10460 - RNA, 19 nt, synthetic construct
  source 1..19: mol_type = other RNA
tggaagtacaaacttaatt

SEQ ID NO: 10461 - RNA, 19 nt, synthetic construct
  source 1..19: mol_type = other RNA
atggaagtacaaacttaat

SEQ ID NO: 10462 - RNA, 19 nt, synthetic construct
  source 1..19: mol_type = other RNA
tatggaagtacaaacttaa

SEQ ID NO: 10463 - RNA, 19 nt, synthetic construct
  source 1..19: mol_type = other RNA
ttatggaagtacaaactta

SEQ ID NO: 10464 - RNA, 19 nt, synthetic construct
  source 1..19: mol_type = other RNA
cttatggaagtacaaactt

SEQ ID NO: 10465 - RNA, 19 nt, synthetic construct
  source 1..19: mol_type = other RNA
gcttatggaagtacaaact

SEQ ID NO: 10466 - RNA, 19 nt, synthetic construct
  source 1..19: mol_type = other RNA
agcttatggaagtacaaac

SEQ ID NO: 10467 - RNA, 19 nt, synthetic construct
  source 1..19: mol_type = other RNA
aagcttatggaagtacaaa

SEQ ID NO: 10468 - RNA, 19 nt, synthetic construct
  source 1..19: mol_type = other RNA
caagcttatggaagtacaa

SEQ ID NO: 10469 - RNA, 19 nt, synthetic construct
  source 1..19: mol_type = other RNA
ccaagcttatggaagtaca

SEQ ID NO: 10470 - RNA, 19 nt, synthetic construct
  source 1..19: mol_type = other RNA
tccaagcttatggaagtac

SEQ ID NO: 10471 - RNA, 19 nt, synthetic construct
  source 1..19: mol_type = other RNA
atccaagcttatggaagta

SEQ ID NO: 10472 - RNA, 19 nt, synthetic construct
  source 1..19: mol_type = other RNA
aatccaagcttatggaagt

SEQ ID NO: 10473 - RNA, 19 nt, synthetic construct
  source 1..19: mol_type = other RNA
aaatccaagcttatggaag

SEQ ID NO: 10474 - RNA, 19 nt, synthetic construct
  source 1..19: mol_type = other RNA
aaaatccaagcttatggaa

SEQ ID NO: 10475 - RNA, 19 nt, synthetic construct
  source 1..19: mol_type = other RNA
taaaatccaagcttatgga

SEQ ID NO: 10476 - RNA, 19 nt, synthetic construct
  source 1..19: mol_type = other RNA
ttaaaatccaagcttatgg

SEQ ID NO: 10477 - RNA, 19 nt, synthetic construct
  source 1..19: mol_type = other RNA
tttaaaatccaagcttatg

SEQ ID NO: 10478 - RNA, 19 nt, synthetic construct
  source 1..19: mol_type = other RNA
gtttaaaatccaagcttat

SEQ ID NO: 10479 - RNA, 19 nt, synthetic construct
  source 1..19: mol_type = other RNA
tgtttaaaatccaagctta

SEQ ID NO: 10480 - RNA, 19 nt, synthetic construct
  source 1..19: mol_type = other RNA
gtgtttaaaatccaagctt

SEQ ID NO: 10481 - RNA, 19 nt, synthetic construct
  source 1..19: mol_type = other RNA
agtgtttaaaatccaagct

SEQ ID NO: 10482 - RNA, 19 nt, synthetic construct
  source 1..19: mol_type = other RNA
cagtgtttaaaatccaagc

SEQ ID NO: 10483 - RNA, 19 nt, synthetic construct
  source 1..19: mol_type = other RNA
tcagtgtttaaaatccaag

SEQ ID NO: 10484 - RNA, 19 nt, synthetic construct
  source 1..19: mol_type = other RNA
atcagtgtttaaaatccaa

SEQ ID NO: 10485 - RNA, 19 nt, synthetic construct
  source 1..19: mol_type = other RNA
tatcagtgtttaaaatcca

SEQ ID NO: 10486 - RNA, 19 nt, synthetic construct
  source 1..19: mol_type = other RNA
ctatcagtgtttaaaatcc

SEQ ID NO: 10487 - RNA, 19 nt, synthetic construct
  source 1..19: mol_type = other RNA
actatcagtgtttaaaatc

SEQ ID NO: 10488 - RNA, 19 nt, synthetic construct
  source 1..19: mol_type = other RNA
tactatcagtgtttaaaat

SEQ ID NO: 10489 - RNA, 19 nt, synthetic construct
  source 1..19: mol_type = other RNA
atactatcagtgtttaaaa

SEQ ID NO: 10490 - RNA, 19 nt, synthetic construct
  source 1..19: mol_type = other RNA
gatactatcagtgtttaaa

SEQ ID NO: 10491 - RNA, 19 nt, synthetic construct
  source 1..19: mol_type = other RNA
agatactatcagtgtttaa

SEQ ID NO: 10492 - RNA, 19 nt, synthetic construct
  source 1..19: mol_type = other RNA
gagatactatcagtgttta

SEQ ID NO: 10493 - RNA, 19 nt, synthetic construct
  source 1..19: mol_type = other RNA
tgagatactatcagtgttt

SEQ ID NO: 10494 - RNA, 19 nt, synthetic construct
  source 1..19: mol_type = other RNA
atgagatactatcagtgtt

SEQ ID NO: 10495 - RNA, 19 nt, synthetic construct
  source 1..19: mol_type = other RNA
catgagatactatcagtgt

SEQ ID NO: 10496 - RNA, 19 nt, synthetic construct
  source 1..19: mol_type = other RNA
tcatgagatactatcagtg

SEQ ID NO: 10497 - RNA, 19 nt, synthetic construct
  source 1..19: mol_type = other RNA
ctcatgagatactatcagt

SEQ ID NO: 10498 - RNA, 19 nt, synthetic construct
  source 1..19: mol_type = other RNA
actcatgagatactatcag

SEQ ID NO: 10499 - RNA, 19 nt, synthetic construct
  source 1..19: mol_type = other RNA
tactcatgagatactatca

SEQ ID NO: 10500 - RNA, 19 nt, synthetic construct
  source 1..19: mol_type = other RNA
ttactcatgagatactatc

SEQ ID NO: 10501 - RNA, 19 nt, synthetic construct
  source 1..19: mol_type = other RNA
attactcatgagatactat

SEQ ID NO: 10502 - RNA, 19 nt, synthetic construct
  source 1..19: mol_type = other RNA
cattactcatgagatacta

SEQ ID NO: 10503 - RNA, 19 nt, synthetic construct
  source 1..19: mol_type = other RNA
acattactcatgagatact

SEQ ID NO: 10504 - RNA, 19 nt, synthetic construct
  source 1..19: mol_type = other RNA
cacattactcatgagatac

SEQ ID NO: 10505 - RNA, 19 nt, synthetic construct
  source 1..19: mol_type = other RNA
acacattactcatgagata

SEQ ID NO: 10506 - RNA, 19 nt, synthetic construct
  source 1..19: mol_type = other RNA
cacacattactcatgagat

SEQ ID NO: 10507 - RNA, 19 nt, synthetic construct
  source 1..19: mol_type = other RNA
acacacattactcatgaga

SEQ ID NO: 10508 - RNA, 19 nt, synthetic construct
  source 1..19: mol_type = other RNA
aacacacattactcatgag

SEQ ID NO: 10509 - RNA, 19 nt, synthetic construct
  source 1..19: mol_type = other RNA
aaacacacattactcatga

SEQ ID NO: 10510 - RNA, 19 nt, synthetic construct
  source 1..19: mol_type = other RNA
aaaacacacattactcatg

SEQ ID NO: 10511 - RNA, 19 nt, synthetic construct
  source 1..19: mol_type = other RNA
caaaacacacattactcat

SEQ ID NO: 10512 - RNA, 19 nt, synthetic construct
  source 1..19: mol_type = other RNA
ccaaaacacacattactca

SEQ ID NO: 10513 - RNA, 19 nt, synthetic construct
  source 1..19: mol_type = other RNA
cccaaaacacacattactc

SEQ ID NO: 10514 - RNA, 19 nt, synthetic construct
  source 1..19: mol_type = other RNA
tcccaaaacacacattact

SEQ ID NO: 10515 - RNA, 19 nt, synthetic construct
  source 1..19: mol_type = other RNA
ctcccaaaacacacattac

SEQ ID NO: 10516 - RNA, 19 nt, synthetic construct
  source 1..19: mol_type = other RNA
tctcccaaaacacacatta

SEQ ID NO: 10517 - RNA, 19 nt, synthetic construct
  source 1..19: mol_type = other RNA
ctctcccaaaacacacatt

SEQ ID NO: 10518 - RNA, 19 nt, synthetic construct
  source 1..19: mol_type = other RNA
cctctcccaaaacacacat

SEQ ID NO: 10519 - RNA, 19 nt, synthetic construct
  source 1..19: mol_type = other RNA
ccctctcccaaaacacaca

SEQ ID NO: 10520 - RNA, 19 nt, synthetic construct
  source 1..19: mol_type = other RNA
tccctctcccaaaacacac

SEQ ID NO: 10521 - RNA, 19 nt, synthetic construct
  source 1..19: mol_type = other RNA
ctccctctcccaaaacaca

SEQ ID NO: 10522 - RNA, 19 nt, synthetic construct
  source 1..19: mol_type = other RNA
cctccctctcccaaaacac

SEQ ID NO: 10523 - RNA, 19 nt, synthetic construct
  source 1..19: mol_type = other RNA
ccctccctctcccaaaaca

SEQ ID NO: 10524 - RNA, 19 nt, synthetic construct
  source 1..19: mol_type = other RNA
tccctccctctcccaaaac

SEQ ID NO: 10525 - RNA, 19 nt, synthetic construct
  source 1..19: mol_type = other RNA
atccctccctctcccaaaa

SEQ ID NO: 10526 - RNA, 19 nt, synthetic construct
  source 1..19: mol_type = other RNA
catccctccctctcccaaa

SEQ ID NO: 10527 - RNA, 19 nt, synthetic construct
  source 1..19: mol_type = other RNA
gcatccctccctctcccaa

SEQ ID NO: 10528 - RNA, 19 nt, synthetic construct
  source 1..19: mol_type = other RNA
agcatccctccctctccca

SEQ ID NO: 10529 - RNA, 19 nt, synthetic construct
  source 1..19: mol_type = other RNA
cagcatccctccctctccc

SEQ ID NO: 10530 - RNA, 19 nt, synthetic construct
  source 1..19: mol_type = other RNA
tcagcatccctccctctcc

SEQ ID NO: 10531 - RNA, 19 nt, synthetic construct
  source 1..19: mol_type = other RNA
atcagcatccctccctctc

SEQ ID NO: 10532 - RNA, 19 nt, synthetic construct
  source 1..19: mol_type = other RNA
aatcagcatccctccctct

SEQ ID NO: 10533 - RNA, 19 nt, synthetic construct
  source 1..19: mol_type = other RNA
caatcagcatccctccctc

SEQ ID NO: 10534 - RNA, 19 nt, synthetic construct
  source 1..19: mol_type = other RNA
tcaatcagcatccctccct

SEQ ID NO: 10535 - RNA, 19 nt, synthetic construct
  source 1..19: mol_type = other RNA
atcaatcagcatccctccc

SEQ ID NO: 10536 - RNA, 19 nt, synthetic construct
  source 1..19: mol_type = other RNA
tatcaatcagcatccctcc

SEQ ID NO: 10537 - RNA, 19 nt, synthetic construct
  source 1..19: mol_type = other RNA
atatcaatcagcatccctc

SEQ ID NO: 10538 - RNA, 19 nt, synthetic construct
  source 1..19: mol_type = other RNA
aatatcaatcagcatccct

SEQ ID NO: 10539 - RNA, 19 nt, synthetic construct
  source 1..19: mol_type = other RNA
aaatatcaatcagcatccc

SEQ ID NO: 10540 - RNA, 19 nt, synthetic construct
  source 1..19: mol_type = other RNA
gaaatatcaatcagcatcc

SEQ ID NO: 10541 - RNA, 19 nt, synthetic construct
  source 1..19: mol_type = other RNA
tgaaatatcaatcagcatc

SEQ ID NO: 10542 - RNA, 19 nt, synthetic construct
  source 1..19: mol_type = other RNA
gtgaaatatcaatcagcat

SEQ ID NO: 10543 - RNA, 19 nt, synthetic construct
  source 1..19: mol_type = other RNA
tgtgaaatatcaatcagca

SEQ ID NO: 10544 - RNA, 19 nt, synthetic construct
  source 1..19: mol_type = other RNA
atgtgaaatatcaatcagc

SEQ ID NO: 10545 - RNA, 19 nt, synthetic construct
  source 1..19: mol_type = other RNA
aatgtgaaatatcaatcag

SEQ ID NO: 10546 - RNA, 19 nt, synthetic construct
  source 1..19: mol_type = other RNA
caatgtgaaatatcaatca

SEQ ID NO: 10547 - RNA, 19 nt, synthetic construct
  source 1..19: mol_type = other RNA
acaatgtgaaatatcaatc

SEQ ID NO: 10548 - RNA, 19 nt, synthetic construct
  source 1..19: mol_type = other RNA
tacaatgtgaaatatcaat

SEQ ID NO: 10549 - RNA, 19 nt, synthetic construct
  source 1..19: mol_type = other RNA
atacaatgtgaaatatcaa

SEQ ID NO: 10550 - RNA, 19 nt, synthetic construct
  source 1..19: mol_type = other RNA
catacaatgtgaaatatca

SEQ ID NO: 10551 - RNA, 19 nt, synthetic construct
  source 1..19: mol_type = other RNA
tcatacaatgtgaaatatc

SEQ ID NO: 10552 - RNA, 19 nt, synthetic construct
  source 1..19: mol_type = other RNA
ttcatacaatgtgaaatat

SEQ ID NO: 10553 - RNA, 19 nt, synthetic construct
  source 1..19: mol_type = other RNA
tttcatacaatgtgaaata

SEQ ID NO: 10554 - RNA, 19 nt, synthetic construct
  source 1..19: mol_type = other RNA
atttcatacaatgtgaaat

SEQ ID NO: 10555 - RNA, 19 nt, synthetic construct
  source 1..19: mol_type = other RNA
tatttcatacaatgtgaaa

SEQ ID NO: 10556 - RNA, 19 nt, synthetic construct
  source 1..19: mol_type = other RNA
gtatttcatacaatgtgaa

SEQ ID NO: 10557 - RNA, 19 nt, synthetic construct
  source 1..19: mol_type = other RNA
ggtatttcatacaatgtga

SEQ ID NO: 10558 - RNA, 19 nt, synthetic construct
  source 1..19: mol_type = other RNA
tggtatttcatacaatgtg

SEQ ID NO: 10559 - RNA, 19 nt, synthetic construct
  source 1..19: mol_type = other RNA
atggtatttcatacaatgt

SEQ ID NO: 10560 - RNA, 19 nt, synthetic construct
  source 1..19: mol_type = other RNA
catggtatttcatacaatg

SEQ ID NO: 10561 - RNA, 19 nt, synthetic construct
  source 1..19: mol_type = other RNA
acatggtatttcatacaat

SEQ ID NO: 10562 - RNA, 19 nt, synthetic construct
  source 1..19: mol_type = other RNA
aacatggtatttcatacaa

SEQ ID NO: 10563 - RNA, 19 nt, synthetic construct
  source 1..19: mol_type = other RNA
aaacatggtatttcataca

SEQ ID NO: 10564 - RNA, 19 nt, synthetic construct
  source 1..19: mol_type = other RNA
caaacatggtatttcatac

SEQ ID NO: 10565 - RNA, 19 nt, synthetic construct
  source 1..19: mol_type = other RNA
tcaaacatggtatttcata

SEQ ID NO: 10566 - RNA, 19 nt, synthetic construct
  source 1..19: mol_type = other RNA
ttcaaacatggtatttcat

SEQ ID NO: 10567 - RNA, 19 nt, synthetic construct
  source 1..19: mol_type = other RNA
tttcaaacatggtatttca

SEQ ID NO: 10568 - RNA, 19 nt, synthetic construct
  source 1..19: mol_type = other RNA
gtttcaaacatggtatttc

SEQ ID NO: 10569 - RNA, 19 nt, synthetic construct
  source 1..19: mol_type = other RNA
agtttcaaacatggtattt

SEQ ID NO: 10570 - RNA, 19 nt, synthetic construct
  source 1..19: mol_type = other RNA
gagtttcaaacatggtatt

SEQ ID NO: 10571 - RNA, 19 nt, synthetic construct
  source 1..19: mol_type = other RNA
tgagtttcaaacatggtat

SEQ ID NO: 10572 - RNA, 19 nt, synthetic construct
  source 1..19: mol_type = other RNA
atgagtttcaaacatggta

SEQ ID NO: 10573 - RNA, 19 nt, synthetic construct
  source 1..19: mol_type = other RNA
tatgagtttcaaacatggt

SEQ ID NO: 10574 - RNA, 19 nt, synthetic construct
  source 1..19: mol_type = other RNA
ctatgagtttcaaacatgg

SEQ ID NO: 10575 - RNA, 19 nt, synthetic construct
  source 1..19: mol_type = other RNA
gctatgagtttcaaacatg

SEQ ID NO: 10576 - RNA, 19 nt, synthetic construct
  source 1..19: mol_type = other RNA
tgctatgagtttcaaacat

SEQ ID NO: 10577 - RNA, 19 nt, synthetic construct
  source 1..19: mol_type = other RNA
ttgctatgagtttcaaaca

SEQ ID NO: 10578 - RNA, 19 nt, synthetic construct
  source 1..19: mol_type = other RNA
attgctatgagtttcaaac

SEQ ID NO: 10579 - RNA, 19 nt, synthetic construct
  source 1..19: mol_type = other RNA
tattgctatgagtttcaaa

SEQ ID NO: 10580 - RNA, 19 nt, synthetic construct
  source 1..19: mol_type = other RNA
ttattgctatgagtttcaa

SEQ ID NO: 10581 - RNA, 19 nt, synthetic construct
  source 1..19: mol_type = other RNA
attattgctatgagtttca

SEQ ID NO: 10582 - RNA, 19 nt, synthetic construct
  source 1..19: mol_type = other RNA
cattattgctatgagtttc

SEQ ID NO: 10583 - RNA, 19 nt, synthetic construct
  source 1..19: mol_type = other RNA
gcattattgctatgagttt

SEQ ID NO: 10584 - RNA, 19 nt, synthetic construct
  source 1..19: mol_type = other RNA
agcattattgctatgagtt

SEQ ID NO: 10585 - RNA, 19 nt, synthetic construct
  source 1..19: mol_type = other RNA
tagcattattgctatgagt

SEQ ID NO: 10586 - RNA, 19 nt, synthetic construct
  source 1..19: mol_type = other RNA
atagcattattgctatgag

SEQ ID NO: 10587 - RNA, 19 nt, synthetic construct
  source 1..19: mol_type = other RNA
catagcattattgctatga

SEQ ID NO: 10588 - RNA, 19 nt, synthetic construct
  source 1..19: mol_type = other RNA
gcatagcattattgctatg

SEQ ID NO: 10589 - RNA, 19 nt, synthetic construct
  source 1..19: mol_type = other RNA
agcatagcattattgctat

SEQ ID NO: 10590 - RNA, 19 nt, synthetic construct
  source 1..19: mol_type = other RNA
cagcatagcattattgcta

SEQ ID NO: 10591 - RNA, 19 nt, synthetic construct
  source 1..19: mol_type = other RNA
acagcatagcattattgct

SEQ ID NO: 10592 - RNA, 19 nt, synthetic construct
  source 1..19: mol_type = other RNA
aacagcatagcattattgc

SEQ ID NO: 10593 - RNA, 19 nt, synthetic construct
  source 1..19: mol_type = other RNA
caacagcatagcattattg

SEQ ID NO: 10594 - RNA, 19 nt, synthetic construct
  source 1..19: mol_type = other RNA
acaacagcatagcattatt

SEQ ID NO: 10595 - RNA, 19 nt, synthetic construct
  source 1..19: mol_type = other RNA
cacaacagcatagcattat

SEQ ID NO: 10596 - RNA, 19 nt, synthetic construct
  source 1..19: mol_type = other RNA
tcacaacagcatagcatta

SEQ ID NO: 10597 - RNA, 19 nt, synthetic construct
  source 1..19: mol_type = other RNA
atcacaacagcatagcatt

SEQ ID NO: 10598 - RNA, 19 nt, synthetic construct
  source 1..19: mol_type = other RNA
gatcacaacagcatagcat

SEQ ID NO: 10599 - RNA, 19 nt, synthetic construct
  source 1..19: mol_type = other RNA
ggatcacaacagcatagca

SEQ ID NO: 10600 - RNA, 19 nt, synthetic construct
  source 1..19: mol_type = other RNA
gggatcacaacagcatagc

SEQ ID NO: 10601 - RNA, 19 nt, synthetic construct
  source 1..19: mol_type = other RNA
agggatcacaacagcatag

SEQ ID NO: 10602 - RNA, 19 nt, synthetic construct
  source 1..19: mol_type = other RNA
gagggatcacaacagcata

SEQ ID NO: 10603 - RNA, 19 nt, synthetic construct
  source 1..19: mol_type = other RNA
agagggatcacaacagcat

SEQ ID NO: 10604 - RNA, 19 nt, synthetic construct
  source 1..19: mol_type = other RNA
gagagggatcacaacagca

SEQ ID NO: 10605 - RNA, 19 nt, synthetic construct
  source 1..19: mol_type = other RNA
tgagagggatcacaacagc

SEQ ID NO: 10606 - RNA, 19 nt, synthetic construct
  source 1..19: mol_type = other RNA
ttgagagggatcacaacag

SEQ ID NO: 10607 - RNA, 19 nt, synthetic construct
  source 1..19: mol_type = other RNA
cttgagagggatcacaaca

SEQ ID NO: 10608 - RNA, 19 nt, synthetic construct
  source 1..19: mol_type = other RNA
acttgagagggatcacaac

SEQ ID NO: 10609 - RNA, 19 nt, synthetic construct
  source 1..19: mol_type = other RNA
aacttgagagggatcacaa

SEQ ID NO: 10610 - RNA, 19 nt, synthetic construct
  source 1..19: mol_type = other RNA
gaacttgagagggatcaca

SEQ ID NO: 10611 - RNA, 19 nt, synthetic construct
  source 1..19: mol_type = other RNA
agaacttgagagggatcac

SEQ ID NO: 10612 - RNA, 19 nt, synthetic construct
  source 1..19: mol_type = other RNA
cagaacttgagagggatca

SEQ ID NO: 10613 - RNA, 19 nt, synthetic construct
  source 1..19: mol_type = other RNA
gcagaacttgagagggatc

SEQ ID NO: 10614 - RNA, 19 nt, synthetic construct
  source 1..19: mol_type = other RNA
tgcagaacttgagagggat

SEQ ID NO: 10615 - RNA, 19 nt, synthetic construct
  source 1..19: mol_type = other RNA
atgcagaacttgagaggga

SEQ ID NO: 10616 - RNA, 19 nt, synthetic construct
  source 1..19: mol_type = other RNA
aatgcagaacttgagaggg

SEQ ID NO: 10617 - RNA, 19 nt, synthetic construct
  source 1..19: mol_type = other RNA
aaatgcagaacttgagagg

SEQ ID NO: 10618 - RNA, 19 nt, synthetic construct
  source 1..19: mol_type = other RNA
taaatgcagaacttgagag

SEQ ID NO: 10619 - RNA, 19 nt, synthetic construct
  source 1..19: mol_type = other RNA
ttaaatgcagaacttgaga

SEQ ID NO: 10620 - RNA, 19 nt, synthetic construct
  source 1..19: mol_type = other RNA
tttaaatgcagaacttgag

SEQ ID NO: 10621 - RNA, 19 nt, synthetic construct
  source 1..19: mol_type = other RNA
ttttaaatgcagaacttga

SEQ ID NO: 10622 - RNA, 19 nt, synthetic construct
  source 1..19: mol_type = other RNA
attttaaatgcagaacttg

SEQ ID NO: 10623 - RNA, 19 nt, synthetic construct
  source 1..19: mol_type = other RNA
tattttaaatgcagaactt

SEQ ID NO: 10624 - RNA, 19 nt, synthetic construct
  source 1..19: mol_type = other RNA
atattttaaatgcagaact

SEQ ID NO: 10625 - RNA, 19 nt, synthetic construct
  source 1..19: mol_type = other RNA
tatattttaaatgcagaac

SEQ ID NO: 10626 - RNA, 19 nt, synthetic construct
  source 1..19: mol_type = other RNA
atatattttaaatgcagaa

SEQ ID NO: 10627 - RNA, 19 nt, synthetic construct
  source 1..19: mol_type = other RNA
aatatattttaaatgcaga

SEQ ID NO: 10628 - RNA, 19 nt, synthetic construct
  source 1..19: mol_type = other RNA
aaatatattttaaatgcag

SEQ ID NO: 10629 - RNA, 19 nt, synthetic construct
  source 1..19: mol_type = other RNA
aaaatatattttaaatgca

SEQ ID NO: 10630 - RNA, 19 nt, synthetic construct
  source 1..19: mol_type = other RNA
aaaaatatattttaaatgc

SEQ ID NO: 10631 - RNA, 19 nt, synthetic construct
  source 1..19: mol_type = other RNA
aaaaaatatattttaaatg

SEQ ID NO: 10632 - RNA, 19 nt, synthetic construct
  source 1..19: mol_type = other RNA
gaaaaaatatattttaaat

SEQ ID NO: 10633 - RNA, 19 nt, synthetic construct
  source 1..19: mol_type = other RNA
agaaaaaatatattttaaa

SEQ ID NO: 10634 - RNA, 19 nt, synthetic construct
  source 1..19: mol_type = other RNA
aagaaaaaatatattttaa

SEQ ID NO: 10635 - RNA, 19 nt, synthetic construct
  source 1..19: mol_type = other RNA
aaagaaaaaatatatttta

SEQ ID NO: 10636 - RNA, 19 nt, synthetic construct
  source 1..19: mol_type = other RNA
taaagaaaaaatatatttt

SEQ ID NO: 10637 - RNA, 19 nt, synthetic construct
  source 1..19: mol_type = other RNA
ataaagaaaaaatatattt

SEQ ID NO: 10638 - RNA, 19 nt, synthetic construct
  source 1..19: mol_type = other RNA
tataaagaaaaaatatatt

SEQ ID NO: 10639 - RNA, 19 nt, synthetic construct
  source 1..19: mol_type = other RNA
ctataaagaaaaaatatat

SEQ ID NO: 10640 - RNA, 19 nt, synthetic construct
  source 1..19: mol_type = other RNA
cctataaagaaaaaatata

SEQ ID NO: 10641 - RNA, 19 nt, synthetic construct
  source 1..19: mol_type = other RNA
tcctataaagaaaaaatat

SEQ ID NO: 10642 - RNA, 19 nt, synthetic construct
  source 1..19: mol_type = other RNA
ttcctataaagaaaaaata

SEQ ID NO: 10643 - RNA, 19 nt, synthetic construct
  source 1..19: mol_type = other RNA
attcctataaagaaaaaat

SEQ ID NO: 10644 - RNA, 19 nt, synthetic construct
  source 1..19: mol_type = other RNA
aattcctataaagaaaaaa

SEQ ID NO: 10645 - RNA, 19 nt, synthetic construct
  source 1..19: mol_type = other RNA
caattcctataaagaaaaa

SEQ ID NO: 10646 - RNA, 19 nt, synthetic construct
  source 1..19: mol_type = other RNA
tcaattcctataaagaaaa

SEQ ID NO: 10647 - RNA, 19 nt, synthetic construct
  source 1..19: mol_type = other RNA
atcaattcctataaagaaa

SEQ ID NO: 10648 - RNA, 19 nt, synthetic construct
  source 1..19: mol_type = other RNA
catcaattcctataaagaa

SEQ ID NO: 10649 - RNA, 19 nt, synthetic construct
  source 1..19: mol_type = other RNA
acatcaattcctataaaga

SEQ ID NO: 10650 - RNA, 19 nt, synthetic construct
  source 1..19: mol_type = other RNA
tacatcaattcctataaag

SEQ ID NO: 10651 - RNA, 19 nt, synthetic construct
  source 1..19: mol_type = other RNA
atacatcaattcctataaa

SEQ ID NO: 10652 - RNA, 19 nt, synthetic construct
  source 1..19: mol_type = other RNA
tatacatcaattcctataa

SEQ ID NO: 10653 - RNA, 19 nt, synthetic construct
  source 1..19: mol_type = other RNA
gtatacatcaattcctata

SEQ ID NO: 10654 - RNA, 19 nt, synthetic construct
  source 1..19: mol_type = other RNA
ggtatacatcaattcctat

SEQ ID NO: 10655 - RNA, 19 nt, synthetic construct
  source 1..19: mol_type = other RNA
tggtatacatcaattccta

SEQ ID NO: 10656 - RNA, 19 nt, synthetic construct
  source 1..19: mol_type = other RNA
atggtatacatcaattcct

SEQ ID NO: 10657 - RNA, 19 nt, synthetic construct
  source 1..19: mol_type = other RNA
catggtatacatcaattcc

SEQ ID NO: 10658 - RNA, 19 nt, synthetic construct
  source 1..19: mol_type = other RNA
tcatggtatacatcaattc

SEQ ID NO: 10659 - RNA, 19 nt, synthetic construct
  source 1..19: mol_type = other RNA
ttcatggtatacatcaatt

SEQ ID NO: 10660 - RNA, 19 nt, synthetic construct
  source 1..19: mol_type = other RNA
cttcatggtatacatcaat

SEQ ID NO: 10661 - RNA, 19 nt, synthetic construct
  source 1..19: mol_type = other RNA
acttcatggtatacatcaa

SEQ ID NO: 10662 - RNA, 19 nt, synthetic construct
  source 1..19: mol_type = other RNA
gacttcatggtatacatca

SEQ ID NO: 10663 - RNA, 19 nt, synthetic construct
  source 1..19: mol_type = other RNA
tgacttcatggtatacatc

SEQ ID NO: 10664 - RNA, 19 nt, synthetic construct
  source 1..19: mol_type = other RNA
atgacttcatggtatacat

SEQ ID NO: 10665 - RNA, 19 nt, synthetic construct
  source 1..19: mol_type = other RNA
aatgacttcatggtataca

SEQ ID NO: 10666 - RNA, 19 nt, synthetic construct
  source 1..19: mol_type = other RNA
caatgacttcatggtatac

SEQ ID NO: 10667 - RNA, 19 nt, synthetic construct
  source 1..19: mol_type = other RNA
acaatgacttcatggtata

SEQ ID NO: 10668 - RNA, 19 nt, synthetic construct
  source 1..19: mol_type = other RNA
gacaatgacttcatggtat

SEQ ID NO: 10669 - RNA, 19 nt, synthetic construct
  source 1..19: mol_type = other RNA
tgacaatgacttcatggta

SEQ ID NO: 10670 - RNA, 19 nt, synthetic construct
  source 1..19: mol_type = other RNA
ctgacaatgacttcatggt

SEQ ID NO: 10671 - RNA, 19 nt, synthetic construct
  source 1..19: mol_type = other RNA
actgacaatgacttcatgg

SEQ ID NO: 10672 - RNA, 19 nt, synthetic construct
  source 1..19: mol_type = other RNA
aactgacaatgacttcatg

SEQ ID NO: 10673 - RNA, 19 nt, synthetic construct
  source 1..19: mol_type = other RNA
caactgacaatgacttcat

SEQ ID NO: 10674 - RNA, 19 nt, synthetic construct
  source 1..19: mol_type = other RNA
acaactgacaatgacttca

SEQ ID NO: 10675 - RNA, 19 nt, synthetic construct
  source 1..19: mol_type = other RNA
tacaactgacaatgacttc

SEQ ID NO: 10676 - RNA, 19 nt, synthetic construct
  source 1..19: mol_type = other RNA
ctacaactgacaatgactt

SEQ ID NO: 10677 - RNA, 19 nt, synthetic construct
  source 1..19: mol_type = other RNA
actacaactgacaatgact

SEQ ID NO: 10678 - RNA, 19 nt, synthetic construct
  source 1..19: mol_type = other RNA
tactacaactgacaatgac

SEQ ID NO: 10679 - RNA, 19 nt, synthetic construct
  source 1..19: mol_type = other RNA
ctactacaactgacaatga

SEQ ID NO: 10680 - RNA, 19 nt, synthetic construct
  source 1..19: mol_type = other RNA
gctactacaactgacaatg

SEQ ID NO: 10681 - RNA, 19 nt, synthetic construct
  source 1..19: mol_type = other RNA
agctactacaactgacaat

SEQ ID NO: 10682 - RNA, 19 nt, synthetic construct
  source 1..19: mol_type = other RNA
gagctactacaactgacaa

SEQ ID NO: 10683 - RNA, 19 nt, synthetic construct
  source 1..19: mol_type = other RNA
agagctactacaactgaca

SEQ ID NO: 10684 - RNA, 19 nt, synthetic construct
  source 1..19: mol_type = other RNA
cagagctactacaactgac

SEQ ID NO: 10685 - RNA, 19 nt, synthetic construct
  source 1..19: mol_type = other RNA
tcagagctactacaactga

SEQ ID NO: 10686 - RNA, 19 nt, synthetic construct
  source 1..19: mol_type = other RNA
atcagagctactacaactg

SEQ ID NO: 10687 - RNA, 19 nt, synthetic construct
  source 1..19: mol_type = other RNA
catcagagctactacaact

SEQ ID NO: 10688 - RNA, 19 nt, synthetic construct
  source 1..19: mol_type = other RNA
acatcagagctactacaac

SEQ ID NO: 10689 - RNA, 19 nt, synthetic construct
  source 1..19: mol_type = other RNA
aacatcagagctactacaa

SEQ ID NO: 10690 - RNA, 19 nt, synthetic construct
  source 1..19: mol_type = other RNA
caacatcagagctactaca

SEQ ID NO: 10691 - RNA, 19 nt, synthetic construct
  source 1..19: mol_type = other RNA
tcaacatcagagctactac

SEQ ID NO: 10692 - RNA, 19 nt, synthetic construct
  source 1..19: mol_type = other RNA
ttcaacatcagagctacta

SEQ ID NO: 10693 - RNA, 19 nt, synthetic construct
  source 1..19: mol_type = other RNA
attcaacatcagagctact

SEQ ID NO: 10694 - RNA, 19 nt, synthetic construct
  source 1..19: mol_type = other RNA
cattcaacatcagagctac

SEQ ID NO: 10695 - RNA, 19 nt, synthetic construct
  source 1..19: mol_type = other RNA
tcattcaacatcagagcta

SEQ ID NO: 10696 - RNA, 19 nt, synthetic construct
  source 1..19: mol_type = other RNA
ctcattcaacatcagagct

SEQ ID NO: 10697 - RNA, 19 nt, synthetic construct
  source 1..19: mol_type = other RNA
tctcattcaacatcagagc

SEQ ID NO: 10698 - RNA, 19 nt, synthetic construct
  source 1..19: mol_type = other RNA
atctcattcaacatcagag

SEQ ID NO: 10699 - RNA, 19 nt, synthetic construct
  source 1..19: mol_type = other RNA
tatctcattcaacatcaga

SEQ ID NO: 10700 - RNA, 19 nt, synthetic construct
  source 1..19: mol_type = other RNA
atatctcattcaacatcag

SEQ ID NO: 10701 - RNA, 19 nt, synthetic construct
  source 1..19: mol_type = other RNA
gatatctcattcaacatca

SEQ ID NO: 10702 - RNA, 19 nt, synthetic construct
  source 1..19: mol_type = other RNA
tgatatctcattcaacatc

SEQ ID NO: 10703 - RNA, 19 nt, synthetic construct
  source 1..19: mol_type = other RNA
atgatatctcattcaacat

SEQ ID NO: 10704 - RNA, 19 nt, synthetic construct
  source 1..19: mol_type = other RNA
catgatatctcattcaaca

SEQ ID NO: 10705 - RNA, 19 nt, synthetic construct
  source 1..19: mol_type = other RNA
acatgatatctcattcaac

SEQ ID NO: 10706 - RNA, 19 nt, synthetic construct
  source 1..19: mol_type = other RNA
aacatgatatctcattcaa

SEQ ID NO: 10707 - RNA, 19 nt, synthetic construct
  source 1..19: mol_type = other RNA
aaacatgatatctcattca

SEQ ID NO: 10708 - RNA, 19 nt, synthetic construct
  source 1..19: mol_type = other RNA
aaaacatgatatctcattc

SEQ ID NO: 10709 - RNA, 19 nt, synthetic construct
  source 1..19: mol_type = other RNA
taaaacatgatatctcatt

SEQ ID NO: 10710 - RNA, 19 nt, synthetic construct
  source 1..19: mol_type = other RNA
ctaaaacatgatatctcat

SEQ ID NO: 10711 - RNA, 19 nt, synthetic construct
  source 1..19: mol_type = other RNA
gctaaaacatgatatctca

SEQ ID NO: 10712 - RNA, 19 nt, synthetic construct
  source 1..19: mol_type = other RNA
tgctaaaacatgatatctc

SEQ ID NO: 10713 - RNA, 19 nt, synthetic construct
  source 1..19: mol_type = other RNA
atgctaaaacatgatatct

SEQ ID NO: 10714 - RNA, 19 nt, synthetic construct
  source 1..19: mol_type = other RNA
aatgctaaaacatgatatc

SEQ ID NO: 10715 - RNA, 19 nt, synthetic construct
  source 1..19: mol_type = other RNA
gaatgctaaaacatgatat

SEQ ID NO: 10716 - RNA, 19 nt, synthetic construct
  source 1..19: mol_type = other RNA
ggaatgctaaaacatgata

SEQ ID NO: 10717 - RNA, 19 nt, synthetic construct
  source 1..19: mol_type = other RNA
tggaatgctaaaacatgat

SEQ ID NO: 10718 - RNA, 19 nt, synthetic construct
  source 1..19: mol_type = other RNA
atggaatgctaaaacatga

SEQ ID NO: 10719 - RNA, 19 nt, synthetic construct
  source 1..19: mol_type = other RNA
aatggaatgctaaaacatg

SEQ ID NO: 10720 - RNA, 19 nt, synthetic construct
  source 1..19: mol_type = other RNA
aaatggaatgctaaaacat

SEQ ID NO: 10721 - RNA, 19 nt, synthetic construct
  source 1..19: mol_type = other RNA
aaaatggaatgctaaaaca

SEQ ID NO: 10722 - RNA, 19 nt, synthetic construct
  source 1..19: mol_type = other RNA
taaaatggaatgctaaaac

SEQ ID NO: 10723 - RNA, 19 nt, synthetic construct
  source 1..19: mol_type = other RNA
gtaaaatggaatgctaaaa

SEQ ID NO: 10724 - RNA, 19 nt, synthetic construct
  source 1..19: mol_type = other RNA
agtaaaatggaatgctaaa

SEQ ID NO: 10725 - RNA, 19 nt, synthetic construct
  source 1..19: mol_type = other RNA
cagtaaaatggaatgctaa

SEQ ID NO: 10726 - RNA, 19 nt, synthetic construct
  source 1..19: mol_type = other RNA
tcagtaaaatggaatgcta

SEQ ID NO: 10727 - RNA, 19 nt, synthetic construct
  source 1..19: mol_type = other RNA
gtcagtaaaatggaatgct

SEQ ID NO: 10728 - RNA, 19 nt, synthetic construct
  source 1..19: mol_type = other RNA
agtcagtaaaatggaatgc

SEQ ID NO: 10729 - RNA, 19 nt, synthetic construct
  source 1..19: mol_type = other RNA
tagtcagtaaaatggaatg

SEQ ID NO: 10730 - RNA, 19 nt, synthetic construct
  source 1..19: mol_type = other RNA
ctagtcagtaaaatggaat

SEQ ID NO: 10731 - RNA, 19 nt, synthetic construct
  source 1..19: mol_type = other RNA
cctagtcagtaaaatggaa

SEQ ID NO: 10732 - RNA, 19 nt, synthetic construct
  source 1..19: mol_type = other RNA
ccctagtcagtaaaatgga

SEQ ID NO: 10733 - RNA, 19 nt, synthetic construct
  source 1..19: mol_type = other RNA
accctagtcagtaaaatgg

SEQ ID NO: 10734 - RNA, 19 nt, synthetic construct
  source 1..19: mol_type = other RNA
taccctagtcagtaaaatg

SEQ ID NO: 10735 - RNA, 19 nt, synthetic construct
  source 1..19: mol_type = other RNA
ctaccctagtcagtaaaat

SEQ ID NO: 10736 - RNA, 19 nt, synthetic construct
  source 1..19: mol_type = other RNA
tctaccctagtcagtaaaa

SEQ ID NO: 10737 - RNA, 19 nt, synthetic construct
  source 1..19: mol_type = other RNA
ttctaccctagtcagtaaa

SEQ ID NO: 10738 - RNA, 19 nt, synthetic construct
  source 1..19: mol_type = other RNA
cttctaccctagtcagtaa

SEQ ID NO: 10739 - RNA, 19 nt, synthetic construct
  source 1..19: mol_type = other RNA
tcttctaccctagtcagta

SEQ ID NO: 10740 - RNA, 19 nt, synthetic construct
  source 1..19: mol_type = other RNA
ttcttctaccctagtcagt

SEQ ID NO: 10741 - RNA, 19 nt, synthetic construct
  source 1..19: mol_type = other RNA
gttcttctaccctagtcag

SEQ ID NO: 10742 - RNA, 19 nt, synthetic construct
  source 1..19: mol_type = other RNA
tgttcttctaccctagtca

SEQ ID NO: 10743 - RNA, 19 nt, synthetic construct
  source 1..19: mol_type = other RNA
gtgttcttctaccctagtc

SEQ ID NO: 10744 - RNA, 19 nt, synthetic construct
  source 1..19: mol_type = other RNA
agtgttcttctaccctagt

SEQ ID NO: 10745 - RNA, 19 nt, synthetic construct
  source 1..19: mol_type = other RNA
aagtgttcttctaccctag

SEQ ID NO: 10746 - RNA, 19 nt, synthetic construct
  source 1..19: mol_type = other RNA
aaagtgttcttctacccta

SEQ ID NO: 10747 - RNA, 19 nt, synthetic construct
  source 1..19: mol_type = other RNA
aaaagtgttcttctaccct

SEQ ID NO: 10748 - RNA, 19 nt, synthetic construct
  source 1..19: mol_type = other RNA
gaaaagtgttcttctaccc

SEQ ID NO: 10749 - RNA, 19 nt, synthetic construct
  source 1..19: mol_type = other RNA
agaaaagtgttcttctacc

SEQ ID NO: 10750 - RNA, 19 nt, synthetic construct
  source 1..19: mol_type = other RNA
aagaaaagtgttcttctac

SEQ ID NO: 10751 - RNA, 19 nt, synthetic construct
  source 1..19: mol_type = other RNA
caagaaaagtgttcttcta

SEQ ID NO: 10752 - RNA, 19 nt, synthetic construct
  source 1..19: mol_type = other RNA
ccaagaaaagtgttcttct

SEQ ID NO: 10753 - RNA, 19 nt, synthetic construct
  source 1..19: mol_type = other RNA
gccaagaaaagtgttcttc

SEQ ID NO: 10754 - RNA, 19 nt, synthetic construct
  source 1..19: mol_type = other RNA
agccaagaaaagtgttctt

SEQ ID NO: 10755 - RNA, 19 nt, synthetic construct
  source 1..19: mol_type = other RNA
tagccaagaaaagtgttct

SEQ ID NO: 10756 - RNA, 19 nt, synthetic construct
  source 1..19: mol_type = other RNA
gtagccaagaaaagtgttc

SEQ ID NO: 10757 - RNA, 19 nt, synthetic construct
  source 1..19: mol_type = other RNA
tgtagccaagaaaagtgtt

SEQ ID NO: 10758 - RNA, 19 nt, synthetic construct
  source 1..19: mol_type = other RNA
atgtagccaagaaaagtgt

SEQ ID NO: 10759 - RNA, 19 nt, synthetic construct
  source 1..19: mol_type = other RNA
aatgtagccaagaaaagtg

SEQ ID NO: 10760 - RNA, 19 nt, synthetic construct
  source 1..19: mol_type = other RNA
aaatgtagccaagaaaagt

SEQ ID NO: 10761 - RNA, 19 nt, synthetic construct
  source 1..19: mol_type = other RNA
caaatgtagccaagaaaag

SEQ ID NO: 10762 - RNA, 19 nt, synthetic construct
  source 1..19: mol_type = other RNA
ccaaatgtagccaagaaaa

SEQ ID NO: 10763 - RNA, 19 nt, synthetic construct
  source 1..19: mol_type = other RNA
tccaaatgtagccaagaaa

SEQ ID NO: 10764 - RNA, 19 nt, synthetic construct
  source 1..19: mol_type = other RNA
ctccaaatgtagccaagaa

SEQ ID NO: 10765 - RNA, 19 nt, synthetic construct
  source 1..19: mol_type = other RNA
cctccaaatgtagccaaga

SEQ ID NO: 10766 - RNA, 19 nt, synthetic construct
  source 1..19: mol_type = other RNA
tcctccaaatgtagccaag

SEQ ID NO: 10767 - RNA, 19 nt, synthetic construct
  source 1..19: mol_type = other RNA
atcctccaaatgtagccaa

SEQ ID NO: 10768 - RNA, 19 nt, synthetic construct
  source 1..19: mol_type = other RNA
tatcctccaaatgtagcca

SEQ ID NO: 10769 - RNA, 19 nt, synthetic construct
  source 1..19: mol_type = other RNA
gtatcctccaaatgtagcc

SEQ ID NO: 10770 - RNA, 19 nt, synthetic construct
  source 1..19: mol_type = other RNA
ggtatcctccaaatgtagc

SEQ ID NO: 10771 - RNA, 19 nt, synthetic construct
  source 1..19: mol_type = other RNA
gggtatcctccaaatgtag

SEQ ID NO: 10772 - RNA, 19 nt, synthetic construct
  source 1..19: mol_type = other RNA
tgggtatcctccaaatgta

SEQ ID NO: 10773 - RNA, 19 nt, synthetic construct
  source 1..19: mol_type = other RNA
ctgggtatcctccaaatgt

SEQ ID NO: 10774 - RNA, 19 nt, synthetic construct
  source 1..19: mol_type = other RNA
cctgggtatcctccaaatg

SEQ ID NO: 10775 - RNA, 19 nt, synthetic construct
  source 1..19: mol_type = other RNA
ccctgggtatcctccaaat

SEQ ID NO: 10776 - RNA, 19 nt, synthetic construct
  source 1..19: mol_type = other RNA
tccctgggtatcctccaaa

SEQ ID NO: 10777 - RNA, 19 nt, synthetic construct
  source 1..19: mol_type = other RNA
ctccctgggtatcctccaa

SEQ ID NO: 10778 - RNA, 19 nt, synthetic construct
  source 1..19: mol_type = other RNA
actccctgggtatcctcca

SEQ ID NO: 10779 - RNA, 19 nt, synthetic construct
  source 1..19: mol_type = other RNA
gactccctgggtatcctcc

SEQ ID NO: 10780 - RNA, 19 nt, synthetic construct
  source 1..19: mol_type = other RNA
agactccctgggtatcctc

SEQ ID NO: 10781 - RNA, 19 nt, synthetic construct
  source 1..19: mol_type = other RNA
aagactccctgggtatcct

SEQ ID NO: 10782 - RNA, 19 nt, synthetic construct
  source 1..19: mol_type = other RNA
caagactccctgggtatcc

SEQ ID NO: 10783 - RNA, 19 nt, synthetic construct
  source 1..19: mol_type = other RNA
ccaagactccctgggtatc

SEQ ID NO: 10784 - RNA, 19 nt, synthetic construct
  source 1..19: mol_type = other RNA
cccaagactccctgggtat

SEQ ID NO: 10785 - RNA, 19 nt, synthetic construct
  source 1..19: mol_type = other RNA
acccaagactccctgggta

SEQ ID NO: 10786 - RNA, 19 nt, synthetic construct
  source 1..19: mol_type = other RNA
cacccaagactccctgggt

SEQ ID NO: 10787 - RNA, 19 nt, synthetic construct
  source 1..19: mol_type = other RNA
acacccaagactccctggg

SEQ ID NO: 10788 - RNA, 19 nt, synthetic construct
  source 1..19: mol_type = other RNA
aacacccaagactccctgg

SEQ ID NO: 10789 - RNA, 19 nt, synthetic construct
  source 1..19: mol_type = other RNA
gaacacccaagactccctg

SEQ ID NO: 10790 - RNA, 19 nt, synthetic construct
  source 1..19: mol_type = other RNA
ggaacacccaagactccct

SEQ ID NO: 10791 - RNA, 19 nt, synthetic construct
  source 1..19: mol_type = other RNA
aggaacacccaagactccc

SEQ ID NO: 10792 - RNA, 19 nt, synthetic construct
  source 1..19: mol_type = other RNA
aaggaacacccaagactcc

SEQ ID NO: 10793 - RNA, 19 nt, synthetic construct
  source 1..19: mol_type = other RNA
taaggaacacccaagactc

SEQ ID NO: 10794 - RNA, 19 nt, synthetic construct
  source 1..19: mol_type = other RNA
ataaggaacacccaagact

SEQ ID NO: 10795 - RNA, 19 nt, synthetic construct
  source 1..19: mol_type = other RNA
gataaggaacacccaagac

SEQ ID NO: 10796 - RNA, 19 nt, synthetic construct
  source 1..19: mol_type = other RNA
agataaggaacacccaaga

SEQ ID NO: 10797 - RNA, 19 nt, synthetic construct
  source 1..19: mol_type = other RNA
cagataaggaacacccaag

SEQ ID NO: 10798 - RNA, 19 nt, synthetic construct
  source 1..19: mol_type = other RNA
ccagataaggaacacccaa

SEQ ID NO: 10799 - RNA, 19 nt, synthetic construct
  source 1..19: mol_type = other RNA
cccagataaggaacaccca

SEQ ID NO: 10800 - RNA, 19 nt, synthetic construct
  source 1..19: mol_type = other RNA
ccccagataaggaacaccc

SEQ ID NO: 10801 - RNA, 19 nt, synthetic construct
  source 1..19: mol_type = other RNA
tccccagataaggaacacc

SEQ ID NO: 10802 - RNA, 19 nt, synthetic construct
  source 1..19: mol_type = other RNA
ttccccagataaggaacac

SEQ ID NO: 10803 - RNA, 19 nt, synthetic construct
  source 1..19: mol_type = other RNA
cttccccagataaggaaca

SEQ ID NO: 10804 - RNA, 19 nt, synthetic construct
  source 1..19: mol_type = other RNA
gcttccccagataaggaac

SEQ ID NO: 10805 - RNA, 19 nt, synthetic construct
  source 1..19: mol_type = other RNA
tgcttccccagataaggaa

SEQ ID NO: 10806 - RNA, 19 nt, synthetic construct
  source 1..19: mol_type = other RNA
ttgcttccccagataagga

SEQ ID NO: 10807 - RNA, 19 nt, synthetic construct
  source 1..19: mol_type = other RNA
tttgcttccccagataagg

SEQ ID NO: 10808 - RNA, 19 nt, synthetic construct
  source 1..19: mol_type = other RNA
gtttgcttccccagataag

SEQ ID NO: 10809 - RNA, 19 nt, synthetic construct
  source 1..19: mol_type = other RNA
tgtttgcttccccagataa

SEQ ID NO: 10810 - RNA, 19 nt, synthetic construct
  source 1..19: mol_type = other RNA
atgtttgcttccccagata

SEQ ID NO: 10811 - RNA, 19 nt, synthetic construct
  source 1..19: mol_type = other RNA
aatgtttgcttccccagat

SEQ ID NO: 10812 - RNA, 19 nt, synthetic construct
  source 1..19: mol_type = other RNA
aaatgtttgcttccccaga

SEQ ID NO: 10813 - RNA, 19 nt, synthetic construct
  source 1..19: mol_type = other RNA
gaaatgtttgcttccccag

SEQ ID NO: 10814 - RNA, 19 nt, synthetic construct
  source 1..19: mol_type = other RNA
tgaaatgtttgcttcccca

SEQ ID NO: 10815 - RNA, 19 nt, synthetic construct
  source 1..19: mol_type = other RNA
gtgaaatgtttgcttcccc

SEQ ID NO: 10816 - RNA, 19 nt, synthetic construct
  source 1..19: mol_type = other RNA
agtgaaatgtttgcttccc

SEQ ID NO: 10817 - RNA, 19 nt, synthetic construct
  source 1..19: mol_type = other RNA
tagtgaaatgtttgcttcc

SEQ ID NO: 10818 - RNA, 19 nt, synthetic construct
  source 1..19: mol_type = other RNA
ctagtgaaatgtttgcttc

SEQ ID NO: 10819 - RNA, 19 nt, synthetic construct
  source 1..19: mol_type = other RNA
actagtgaaatgtttgctt

SEQ ID NO: 10820 - RNA, 19 nt, synthetic construct
  source 1..19: mol_type = other RNA
gactagtgaaatgtttgct

SEQ ID NO: 10821 - RNA, 19 nt, synthetic construct
  source 1..19: mol_type = other RNA
agactagtgaaatgtttgc

SEQ ID NO: 10822 - RNA, 19 nt, synthetic construct
  source 1..19: mol_type = other RNA
gagactagtgaaatgtttg

SEQ ID NO: 10823 - RNA, 19 nt, synthetic construct
  source 1..19: mol_type = other RNA
agagactagtgaaatgttt

SEQ ID NO: 10824 - RNA, 19 nt, synthetic construct
  source 1..19: mol_type = other RNA
aagagactagtgaaatgtt

SEQ ID NO: 10825 - RNA, 19 nt, synthetic construct
  source 1..19: mol_type = other RNA
aaagagactagtgaaatgt

SEQ ID NO: 10826 - RNA, 19 nt, synthetic construct
  source 1..19: mol_type = other RNA
aaaagagactagtgaaatg

SEQ ID NO: 10827 - RNA, 19 nt, synthetic construct
  source 1..19: mol_type = other RNA
aaaaagagactagtgaaat

SEQ ID NO: 10828 - RNA, 19 nt, synthetic construct
  source 1..19: mol_type = other RNA
aaaaaagagactagtgaaa

SEQ ID NO: 10829 - RNA, 19 nt, synthetic construct
  source 1..19: mol_type = other RNA
aaaaaaagagactagtgaa

SEQ ID NO: 10830 - RNA, 19 nt, synthetic construct
  source 1..19: mol_type = other RNA
gaaaaaaagagactagtga

SEQ ID NO: 10831 - RNA, 19 nt, synthetic construct
  source 1..19: mol_type = other RNA
tgaaaaaaagagactagtg

SEQ ID NO: 10832 - RNA, 19 nt, synthetic construct
  source 1..19: mol_type = other RNA
atgaaaaaaagagactagt

SEQ ID NO: 10833 - RNA, 19 nt, synthetic construct
  source 1..19: mol_type = other RNA
gatgaaaaaaagagactag

SEQ ID NO: 10834 - RNA, 19 nt, synthetic construct
  source 1..19: mol_type = other RNA
ggatgaaaaaaagagacta

SEQ ID NO: 10835 - RNA, 19 nt, synthetic construct
  source 1..19: mol_type = other RNA
aggatgaaaaaaagagact

SEQ ID NO: 10836 - RNA, 19 nt, synthetic construct
  source 1..19: mol_type = other RNA
aaggatgaaaaaaagagac

SEQ ID NO: 10837 - RNA, 19 nt, synthetic construct
  source 1..19: mol_type = other RNA
aaaggatgaaaaaaagaga

SEQ ID NO: 10838 - RNA, 19 nt, synthetic construct
  source 1..19: mol_type = other RNA
taaaggatgaaaaaaagag

SEQ ID NO: 10839 - RNA, 19 nt, synthetic construct
  source 1..19: mol_type = other RNA
ttaaaggatgaaaaaaaga

SEQ ID NO: 10840 - RNA, 19 nt, synthetic construct
  source 1..19: mol_type = other RNA
tttaaaggatgaaaaaaag

SEQ ID NO: 10841 - RNA, 19 nt, synthetic construct
  source 1..19: mol_type = other RNA
atttaaaggatgaaaaaaa

SEQ ID NO: 10842 - RNA, 19 nt, synthetic construct
  source 1..19: mol_type = other RNA
aatttaaaggatgaaaaaa

SEQ ID NO: 10843 - RNA, 19 nt, synthetic construct
  source 1..19: mol_type = other RNA
caatttaaaggatgaaaaa

SEQ ID NO: 10844 - RNA, 19 nt, synthetic construct
  source 1..19: mol_type = other RNA
acaatttaaaggatgaaaa

SEQ ID NO: 10845 - RNA, 19 nt, synthetic construct
  source 1..19: mol_type = other RNA
tacaatttaaaggatgaaa

SEQ ID NO: 10846 - RNA, 19 nt, synthetic construct
  source 1..19: mol_type = other RNA
ttacaatttaaaggatgaa

SEQ ID NO: 10847 - RNA, 19 nt, synthetic construct
  source 1..19: mol_type = other RNA
tttacaatttaaaggatga

SEQ ID NO: 10848 - RNA, 19 nt, synthetic construct
  source 1..19: mol_type = other RNA
atttacaatttaaaggatg

SEQ ID NO: 10849 - RNA, 19 nt, synthetic construct
  source 1..19: mol_type = other RNA
aatttacaatttaaaggat

SEQ ID NO: 10850 - RNA, 19 nt, synthetic construct
  source 1..19: mol_type = other RNA
taatttacaatttaaagga

SEQ ID NO: 10851 - RNA, 19 nt, synthetic construct
  source 1..19: mol_type = other RNA
ttaatttacaatttaaagg

SEQ ID NO: 10852 - RNA, 19 nt, synthetic construct
  source 1..19: mol_type = other RNA
cttaatttacaatttaaag

SEQ ID NO: 10853 - RNA, 19 nt, synthetic construct
  source 1..19: mol_type = other RNA
ccttaatttacaatttaaa

SEQ ID NO: 10854 - RNA, 19 nt, synthetic construct
  source 1..19: mol_type = other RNA
tccttaatttacaatttaa

SEQ ID NO: 10855 - RNA, 19 nt, synthetic construct
  source 1..19: mol_type = other RNA
atccttaatttacaattta

SEQ ID NO: 10856 - RNA, 19 nt, synthetic construct
  source 1..19: mol_type = other RNA
aatccttaatttacaattt

SEQ ID NO: 10857 - RNA, 19 nt, synthetic construct
  source 1..19: mol_type = other RNA
taatccttaatttacaatt

SEQ ID NO: 10858 - RNA, 19 nt, synthetic construct
  source 1..19: mol_type = other RNA
gtaatccttaatttacaat

SEQ ID NO: 10859 - RNA, 19 nt, synthetic construct
  source 1..19: mol_type = other RNA
agtaatccttaatttacaa

SEQ ID NO: 10860 - RNA, 19 nt, synthetic construct
  source 1..19: mol_type = other RNA
gagtaatccttaatttaca

SEQ ID NO: 10861 - RNA, 19 nt, synthetic construct
  source 1..19: mol_type = other RNA
tgagtaatccttaatttac

SEQ ID NO: 10862 - RNA, 19 nt, synthetic construct
  source 1..19: mol_type = other RNA
ttgagtaatccttaattta

SEQ ID NO: 10863 - RNA, 19 nt, synthetic construct
  source 1..19: mol_type = other RNA
cttgagtaatccttaattt

SEQ ID NO: 10864 - RNA, 19 nt, synthetic construct
  source 1..19: mol_type = other RNA
gcttgagtaatccttaatt

SEQ ID NO: 10865 - RNA, 19 nt, synthetic construct
  source 1..19: mol_type = other RNA
agcttgagtaatccttaat

SEQ ID NO: 10866 - RNA, 19 nt, synthetic construct
  source 1..19: mol_type = other RNA
gagcttgagtaatccttaa

SEQ ID NO: 10867 - RNA, 19 nt, synthetic construct
  source 1..19: mol_type = other RNA
tgagcttgagtaatcctta

SEQ ID NO: 10868 - RNA, 19 nt, synthetic construct
  source 1..19: mol_type = other RNA
gtgagcttgagtaatcctt

SEQ ID NO: 10869 - RNA, 19 nt, synthetic construct
  source 1..19: mol_type = other RNA
ggtgagcttgagtaatcct

SEQ ID NO: 10870 - RNA, 19 nt, synthetic construct
  source 1..19: mol_type = other RNA
tggtgagcttgagtaatcc

SEQ ID NO: 10871 - RNA, 19 nt, synthetic construct
  source 1..19: mol_type = other RNA
atggtgagcttgagtaatc

SEQ ID NO: 10872 - RNA, 19 nt, synthetic construct
  source 1..19: mol_type = other RNA
aatggtgagcttgagtaat

SEQ ID NO: 10873 - RNA, 19 nt, synthetic construct
  source 1..19: mol_type = other RNA
taatggtgagcttgagtaa

SEQ ID NO: 10874 - RNA, 19 nt, synthetic construct
  source 1..19: mol_type = other RNA
ataatggtgagcttgagta

SEQ ID NO: 10875 - RNA, 19 nt, synthetic construct
  source 1..19: mol_type = other RNA
aataatggtgagcttgagt

SEQ ID NO: 10876 - RNA, 19 nt, synthetic construct
  source 1..19: mol_type = other RNA
gaataatggtgagcttgag

SEQ ID NO: 10877 - RNA, 19 nt, synthetic construct
  source 1..19: mol_type = other RNA
tgaataatggtgagcttga

SEQ ID NO: 10878 - RNA, 19 nt, synthetic construct
  source 1..19: mol_type = other RNA
ttgaataatggtgagcttg

SEQ ID NO: 10879 - RNA, 19 nt, synthetic construct
  source 1..19: mol_type = other RNA
cttgaataatggtgagctt

SEQ ID NO: 10880 - RNA, 19 nt, synthetic construct
  source 1..19: mol_type = other RNA
tcttgaataatggtgagct

SEQ ID NO: 10881 - RNA, 19 nt, synthetic construct
  source 1..19: mol_type = other RNA
atcttgaataatggtgagc

SEQ ID NO: 10882 - RNA, 19 nt, synthetic construct
  source 1..19: mol_type = other RNA
aatcttgaataatggtgag

SEQ ID NO: 10883 - RNA, 19 nt, synthetic construct
  source 1..19: mol_type = other RNA
caatcttgaataatggtga

SEQ ID NO: 10884 - RNA, 19 nt, synthetic construct
  source 1..19: mol_type = other RNA
ccaatcttgaataatggtg

SEQ ID NO: 10885 - RNA, 19 nt, synthetic construct
  source 1..19: mol_type = other RNA
cccaatcttgaataatggt

SEQ ID NO: 10886 - RNA, 19 nt, synthetic construct
  source 1..19: mol_type = other RNA
tcccaatcttgaataatgg

SEQ ID NO: 10887 - RNA, 19 nt, synthetic construct
  source 1..19: mol_type = other RNA
gtcccaatcttgaataatg

SEQ ID NO: 10888 - RNA, 19 nt, synthetic construct
  source 1..19: mol_type = other RNA
agtcccaatcttgaataat

SEQ ID NO: 10889 - RNA, 19 nt, synthetic construct
  source 1..19: mol_type = other RNA
gagtcccaatcttgaataa

SEQ ID NO: 10890 - RNA, 19 nt, synthetic construct
  source 1..19: mol_type = other RNA
cgagtcccaatcttgaata

SEQ ID NO: 10891 - RNA, 19 nt, synthetic construct
  source 1..19: mol_type = other RNA
gcgagtcccaatcttgaat

SEQ ID NO: 10892 - RNA, 19 nt, synthetic construct
  source 1..19: mol_type = other RNA
agcgagtcccaatcttgaa

SEQ ID NO: 10893 - RNA, 19 nt, synthetic construct
  source 1..19: mol_type = other RNA
aagcgagtcccaatcttga

SEQ ID NO: 10894 - RNA, 19 nt, synthetic construct
  source 1..19: mol_type = other RNA
gaagcgagtcccaatcttg

SEQ ID NO: 10895 - RNA, 19 nt, synthetic construct
  source 1..19: mol_type = other RNA
ggaagcgagtcccaatctt

SEQ ID NO: 10896 - RNA, 19 nt, synthetic construct
  source 1..19: mol_type = other RNA
gggaagcgagtcccaatct

SEQ ID NO: 10897 - RNA, 19 nt, synthetic construct
  source 1..19: mol_type = other RNA
tgggaagcgagtcccaatc

SEQ ID NO: 10898 - RNA, 19 nt, synthetic construct
  source 1..19: mol_type = other RNA
ctgggaagcgagtcccaat

SEQ ID NO: 10899 - RNA, 19 nt, synthetic construct
  source 1..19: mol_type = other RNA
actgggaagcgagtcccaa

SEQ ID NO: 10900 - RNA, 19 nt, synthetic construct
  source 1..19: mol_type = other RNA
gactgggaagcgagtccca

SEQ ID NO: 10901 - RNA, 19 nt, synthetic construct
  source 1..19: mol_type = other RNA
cgactgggaagcgagtccc

SEQ ID NO: 10902 - RNA, 19 nt, synthetic construct
  source 1..19: mol_type = other RNA
tcgactgggaagcgagtcc

SEQ ID NO: 10903 - RNA, 19 nt, synthetic construct
  source 1..19: mol_type = other RNA
gtcgactgggaagcgagtc

SEQ ID NO: 10904 - RNA, 19 nt, synthetic construct
  source 1..19: mol_type = other RNA
tgtcgactgggaagcgagt

SEQ ID NO: 10905 - RNA, 19 nt, synthetic construct
  source 1..19: mol_type = other RNA
gtgtcgactgggaagcgag

SEQ ID NO: 10906 - RNA, 19 nt, synthetic construct
  source 1..19: mol_type = other RNA
agtgtcgactgggaagcga

SEQ ID NO: 10907 - RNA, 19 nt, synthetic construct
  source 1..19: mol_type = other RNA
gagtgtcgactgggaagcg

SEQ ID NO: 10908 - RNA, 19 nt, synthetic construct
  source 1..19: mol_type = other RNA
agagtgtcgactgggaagc

SEQ ID NO: 10909 - RNA, 19 nt, synthetic construct
  source 1..19: mol_type = other RNA
cagagtgtcgactgggaag

SEQ ID NO: 10910 - RNA, 19 nt, synthetic construct
  source 1..19: mol_type = other RNA
gcagagtgtcgactgggaa

SEQ ID NO: 10911 - RNA, 19 nt, synthetic construct
  source 1..19: mol_type = other RNA
ggcagagtgtcgactggga

SEQ ID NO: 10912 - RNA, 19 nt, synthetic construct
  source 1..19: mol_type = other RNA
gggcagagtgtcgactggg

SEQ ID NO: 10913 - RNA, 19 nt, synthetic construct
  source 1..19: mol_type = other RNA
agggcagagtgtcgactgg

SEQ ID NO: 10914 - RNA, 19 nt, synthetic construct
  source 1..19: mol_type = other RNA
cagggcagagtgtcgactg

SEQ ID NO: 10915 - RNA, 19 nt, synthetic construct
  source 1..19: mol_type = other RNA
gcagggcagagtgtcgact

SEQ ID NO: 10916 - RNA, 19 nt, synthetic construct
  source 1..19: mol_type = other RNA
ggcagggcagagtgtcgac

SEQ ID NO: 10917 - RNA, 19 nt, synthetic construct
  source 1..19: mol_type = other RNA
aggcagggcagagtgtcga

SEQ ID NO: 10918 - RNA, 19 nt, synthetic construct
  source 1..19: mol_type = other RNA
caggcagggcagagtgtcg

SEQ ID NO: 10919 - RNA, 19 nt, synthetic construct
  source 1..19: mol_type = other RNA
acaggcagggcagagtgtc

SEQ ID NO: 10920 - RNA, 19 nt, synthetic construct
  source 1..19: mol_type = other RNA
gacaggcagggcagagtgt

SEQ ID NO: 10921 - RNA, 19 nt, synthetic construct
  source 1..19: mol_type = other RNA
tgacaggcagggcagagtg

SEQ ID NO: 10922 - RNA, 19 nt, synthetic construct
  source 1..19: mol_type = other RNA
atgacaggcagggcagagt

SEQ ID NO: 10923 - RNA, 19 nt, synthetic construct
  source 1..19: mol_type = other RNA
aatgacaggcagggcagag

SEQ ID NO: 10924 - RNA, 19 nt, synthetic construct
  source 1..19: mol_type = other RNA
caatgacaggcagggcaga

SEQ ID NO: 10925 - RNA, 19 nt, synthetic construct
  source 1..19: mol_type = other RNA
gcaatgacaggcagggcag

SEQ ID NO: 10926 - RNA, 19 nt, synthetic construct
  source 1..19: mol_type = other RNA
agcaatgacaggcagggca

SEQ ID NO: 10927 - RNA, 19 nt, synthetic construct
  source 1..19: mol_type = other RNA
cagcaatgacaggcagggc

SEQ ID NO: 10928 - RNA, 19 nt, synthetic construct
  source 1..19: mol_type = other RNA
gcagcaatgacaggcaggg

SEQ ID NO: 10929 - RNA, 19 nt, synthetic construct
  source 1..19: mol_type = other RNA
tgcagcaatgacaggcagg

SEQ ID NO: 10930 - RNA, 19 nt, synthetic construct
  source 1..19: mol_type = other RNA
ttgcagcaatgacaggcag

SEQ ID NO: 10931 - RNA, 19 nt, synthetic construct
  source 1..19: mol_type = other RNA
tttgcagcaatgacaggca

SEQ ID NO: 10932 - RNA, 19 nt, synthetic construct
  source 1..19: mol_type = other RNA
ctttgcagcaatgacaggc

SEQ ID NO: 10933 - RNA, 19 nt, synthetic construct
  source 1..19: mol_type = other RNA
tctttgcagcaatgacagg

SEQ ID NO: 10934 - RNA, 19 nt, synthetic construct
  source 1..19: mol_type = other RNA
ctctttgcagcaatgacag

SEQ ID NO: 10935 - RNA, 19 nt, synthetic construct
  source 1..19: mol_type = other RNA
gctctttgcagcaatgaca

SEQ ID NO: 10936 - RNA, 19 nt, synthetic construct
  source 1..19: mol_type = other RNA
agctctttgcagcaatgac

SEQ ID NO: 10937 - RNA, 19 nt, synthetic construct
  source 1..19: mol_type = other RNA
cagctctttgcagcaatga

SEQ ID NO: 10938 - RNA, 19 nt, synthetic construct
  source 1..19: mol_type = other RNA
gcagctctttgcagcaatg

SEQ ID NO: 10939 - RNA, 19 nt, synthetic construct
  source 1..19: mol_type = other RNA
agcagctctttgcagcaat

SEQ ID NO: 10940 - RNA, 19 nt, synthetic construct
  source 1..19: mol_type = other RNA
cagcagctctttgcagcaa

SEQ ID NO: 10941 - RNA, 19 nt, synthetic construct
  source 1..19: mol_type = other RNA
gcagcagctctttgcagca

SEQ ID NO: 10942 - RNA, 19 nt, synthetic construct
  source 1..19: mol_type = other RNA
agcagcagctctttgcagc

SEQ ID NO: 10943 - RNA, 19 nt, synthetic construct
  source 1..19: mol_type = other RNA
aagcagcagctctttgcag

SEQ ID NO: 10944 - RNA, 19 nt, synthetic construct
  source 1..19: mol_type = other RNA
aaagcagcagctctttgca

SEQ ID NO: 10945 - RNA, 19 nt, synthetic construct
  source 1..19: mol_type = other RNA
caaagcagcagctctttgc

SEQ ID NO: 10946 - RNA, 19 nt, synthetic construct
  source 1..19: mol_type = other RNA
gcaaagcagcagctctttg

SEQ ID NO: 10947 - RNA, 19 nt, synthetic construct
  source 1..19: mol_type = other RNA
ggcaaagcagcagctcttt

SEQ ID NO: 10948 - RNA, 19 nt, synthetic construct
  source 1..19: mol_type = other RNA
tggcaaagcagcagctctt

SEQ ID NO: 10949 - RNA, 19 nt, synthetic construct
  source 1..19: mol_type = other RNA
ttggcaaagcagcagctct

SEQ ID NO: 10950 - RNA, 19 nt, synthetic construct
  source 1..19: mol_type = other RNA
gttggcaaagcagcagctc

SEQ ID NO: 10951 - RNA, 19 nt, synthetic construct
  source 1..19: mol_type = other RNA
ggttggcaaagcagcagct

SEQ ID NO: 10952 - RNA, 19 nt, synthetic construct
  source 1..19: mol_type = other RNA
aggttggcaaagcagcagc

SEQ ID NO: 10953 - RNA, 19 nt, synthetic construct
  source 1..19: mol_type = other RNA
taggttggcaaagcagcag

SEQ ID NO: 10954 - RNA, 19 nt, synthetic construct
  source 1..19: mol_type = other RNA
ttaggttggcaaagcagca

SEQ ID NO: 10955 - RNA, 19 nt, synthetic construct
  source 1..19: mol_type = other RNA
cttaggttggcaaagcagc

SEQ ID NO: 10956 - RNA, 19 nt, synthetic construct
  source 1..19: mol_type = other RNA
gcttaggttggcaaagcag

SEQ ID NO: 10957 - RNA, 19 nt, synthetic construct
  source 1..19: mol_type = other RNA
tgcttaggttggcaaagca

SEQ ID NO: 10958 - RNA, 19 nt, synthetic construct
  source 1..19: mol_type = other RNA
ttgcttaggttggcaaagc

SEQ ID NO: 10959 - RNA, 19 nt, synthetic construct
  source 1..19: mol_type = other RNA
tttgcttaggttggcaaag

SEQ ID NO: 10960 - RNA, 19 nt, synthetic construct
  source 1..19: mol_type = other RNA
ctttgcttaggttggcaaa

SEQ ID NO: 10961 - RNA, 19 nt, synthetic construct
  source 1..19: mol_type = other RNA
tctttgcttaggttggcaa

SEQ ID NO: 10962 - RNA, 19 nt, synthetic construct
  source 1..19: mol_type = other RNA
ttctttgcttaggttggca

SEQ ID NO: 10963 - RNA, 19 nt, synthetic construct
  source 1..19: mol_type = other RNA
tttctttgcttaggttggc

SEQ ID NO: 10964 - RNA, 19 nt, synthetic construct
  source 1..19: mol_type = other RNA
ttttctttgcttaggttgg

SEQ ID NO: 10965 - RNA, 19 nt, synthetic construct
  source 1..19: mol_type = other RNA
attttctttgcttaggttg

SEQ ID NO: 10966 - RNA, 19 nt, synthetic construct
  source 1..19: mol_type = other RNA
tattttctttgcttaggtt

SEQ ID NO: 10967 - RNA, 19 nt, synthetic construct
  source 1..19: mol_type = other RNA
gtattttctttgcttaggt

SEQ ID NO: 10968 - RNA, 19 nt, synthetic construct
  source 1..19: mol_type = other RNA
cgtattttctttgcttagg

SEQ ID NO: 10969 - RNA, 19 nt, synthetic construct
  source 1..19: mol_type = other RNA
ccgtattttctttgcttag

SEQ ID NO: 10970 - RNA, 19 nt, synthetic construct
  source 1..19: mol_type = other RNA
gccgtattttctttgctta

SEQ ID NO: 10971 - RNA, 19 nt, synthetic construct
  source 1..19: mol_type = other RNA
agccgtattttctttgctt

SEQ ID NO: 10972 - RNA, 19 nt, synthetic construct
  source 1..19: mol_type = other RNA
aagccgtattttctttgct

SEQ ID NO: 10973 - RNA, 19 nt, synthetic construct
  source 1..19: mol_type = other RNA
gaagccgtattttctttgc

SEQ ID NO: 10974 - RNA, 19 nt, synthetic construct
  source 1..19: mol_type = other RNA
agaagccgtattttctttg

SEQ ID NO: 10975 - RNA, 19 nt, synthetic construct
  source 1..19: mol_type = other RNA
gagaagccgtattttcttt

SEQ ID NO: 10976 - RNA, 19 nt, synthetic construct
  source 1..19: mol_type = other RNA
agagaagccgtattttctt

SEQ ID NO: 10977 - RNA, 19 nt, synthetic construct
  source 1..19: mol_type = other RNA
aagagaagccgtattttct

SEQ ID NO: 10978 - RNA, 19 nt, synthetic construct
  source 1..19: mol_type = other RNA
caagagaagccgtattttc

SEQ ID NO: 10979 - RNA, 19 nt, synthetic construct
  source 1..19: mol_type = other RNA
gcaagagaagccgtatttt

SEQ ID NO: 10980 - RNA, 19 nt, synthetic construct
  source 1..19: mol_type = other RNA
tgcaagagaagccgtattt

SEQ ID NO: 10981 - RNA, 19 nt, synthetic construct
  source 1..19: mol_type = other RNA
atgcaagagaagccgtatt

SEQ ID NO: 10982 - RNA, 19 nt, synthetic construct
  source 1..19: mol_type = other RNA
aatgcaagagaagccgtat

SEQ ID NO: 10983 - RNA, 19 nt, synthetic construct
  source 1..19: mol_type = other RNA
taatgcaagagaagccgta

SEQ ID NO: 10984 - RNA, 19 nt, synthetic construct
  source 1..19: mol_type = other RNA
ataatgcaagagaagccgt

SEQ ID NO: 10985 - RNA, 19 nt, synthetic construct
  source 1..19: mol_type = other RNA
aataatgcaagagaagccg

SEQ ID NO: 10986 - RNA, 19 nt, synthetic construct
  source 1..19: mol_type = other RNA
aaataatgcaagagaagcc

SEQ ID NO: 10987 - RNA, 19 nt, synthetic construct
  source 1..19: mol_type = other RNA
aaaataatgcaagagaagc

SEQ ID NO: 10988 - RNA, 19 nt, synthetic construct
  source 1..19: mol_type = other RNA
gaaaataatgcaagagaag

SEQ ID NO: 10989 - RNA, 19 nt, synthetic construct
  source 1..19: mol_type = other RNA
ggaaaataatgcaagagaa

SEQ ID NO: 10990 - RNA, 19 nt, synthetic construct
  source 1..19: mol_type = other RNA
gggaaaataatgcaagaga

SEQ ID NO: 10991 - RNA, 19 nt, synthetic construct
  source 1..19: mol_type = other RNA
agggaaaataatgcaagag

SEQ ID NO: 10992 - RNA, 19 nt, synthetic construct
  source 1..19: mol_type = other RNA
aagggaaaataatgcaaga

SEQ ID NO: 10993 - RNA, 19 nt, synthetic construct
  source 1..19: mol_type = other RNA
aaagggaaaataatgcaag

SEQ ID NO: 10994 - RNA, 19 nt, synthetic construct
  source 1..19: mol_type = other RNA
aaaagggaaaataatgcaa

SEQ ID NO: 10995 - RNA, 19 nt, synthetic construct
  source 1..19: mol_type = other RNA
caaaagggaaaataatgca

SEQ ID NO: 10996 - RNA, 19 nt, synthetic construct
  source 1..19: mol_type = other RNA
ccaaaagggaaaataatgc

SEQ ID NO: 10997 - RNA, 19 nt, synthetic construct
  source 1..19: mol_type = other RNA
accaaaagggaaaataatg

SEQ ID NO: 10998 - RNA, 19 nt, synthetic construct
  source 1..19: mol_type = other RNA
aaccaaaagggaaaataat

SEQ ID NO: 10999 - RNA, 19 nt, synthetic construct
  source 1..19: mol_type = other RNA
caaccaaaagggaaaataa

SEQ ID NO: 11000 - RNA, 19 nt, synthetic construct
  source 1..19: mol_type = other RNA
ccaaccaaaagggaaaata

SEQ ID NO: 11001 - RNA, 19 nt, synthetic construct
  source 1..19: mol_type = other RNA
accaaccaaaagggaaaat

SEQ ID NO: 11002 - RNA, 19 nt, synthetic construct
  source 1..19: mol_type = other RNA
aaccaaccaaaagggaaaa

SEQ ID NO: 11003 - RNA, 19 nt, synthetic construct
  source 1..19: mol_type = other RNA
aaaccaaccaaaagggaaa

SEQ ID NO: 11004 - RNA, 19 nt, synthetic construct
  source 1..19: mol_type = other RNA
caaaccaaccaaaagggaa

SEQ ID NO: 11005 - RNA, 19 nt, synthetic construct
  source 1..19: mol_type = other RNA
acaaaccaaccaaaaggga

SEQ ID NO: 11006 - RNA, 19 nt, synthetic construct
  source 1..19: mol_type = other RNA
aacaaaccaaccaaaaggg

SEQ ID NO: 11007 - RNA, 19 nt, synthetic construct
  source 1..19: mol_type = other RNA
aaacaaaccaaccaaaagg

SEQ ID NO: 11008 - RNA, 19 nt, synthetic construct
  source 1..19: mol_type = other RNA
aaaacaaaccaaccaaaag

SEQ ID NO: 11009 - RNA, 19 nt, synthetic construct
  source 1..19: mol_type = other RNA
gaaaacaaaccaaccaaaa

SEQ ID NO: 11010 - RNA, 19 nt, synthetic construct
  source 1..19: mol_type = other RNA
agaaaacaaaccaaccaaa

SEQ ID NO: 11011 - RNA, 19 nt, synthetic construct
  source 1..19: mol_type = other RNA
tagaaaacaaaccaaccaa

SEQ ID NO: 11012 - RNA, 19 nt, synthetic construct
  source 1..19: mol_type = other RNA
ctagaaaacaaaccaacca

SEQ ID NO: 11013 - RNA, 19 nt, synthetic construct
  source 1..19: mol_type = other RNA
tctagaaaacaaaccaacc

SEQ ID NO: 11014 - RNA, 19 nt, synthetic construct
  source 1..19: mol_type = other RNA
ttctagaaaacaaaccaac

SEQ ID NO: 11015 - RNA, 19 nt, synthetic construct
  source 1..19: mol_type = other RNA
cttctagaaaacaaaccaa

SEQ ID NO: 11016 - RNA, 19 nt, synthetic construct
  source 1..19: mol_type = other RNA
acttctagaaaacaaacca

SEQ ID NO: 11017 - RNA, 19 nt, synthetic construct
  source 1..19: mol_type = other RNA
tacttctagaaaacaaacc

SEQ ID NO: 11018 - RNA, 19 nt, synthetic construct
  source 1..19: mol_type = other RNA
gtacttctagaaaacaaac

SEQ ID NO: 11019 - RNA, 19 nt, synthetic construct
  source 1..19: mol_type = other RNA
cgtacttctagaaaacaaa

SEQ ID NO: 11020 - RNA, 19 nt, synthetic construct
  source 1..19: mol_type = other RNA
acgtacttctagaaaacaa

SEQ ID NO: 11021 - RNA, 19 nt, synthetic construct
  source 1..19: mol_type = other RNA
aacgtacttctagaaaaca

SEQ ID NO: 11022 - RNA, 19 nt, synthetic construct
  source 1..19: mol_type = other RNA
gaacgtacttctagaaaac

SEQ ID NO: 11023 - RNA, 19 nt, synthetic construct
  source 1..19: mol_type = other RNA
tgaacgtacttctagaaaa

SEQ ID NO: 11024 - RNA, 19 nt, synthetic construct
  source 1..19: mol_type = other RNA
ctgaacgtacttctagaaa

SEQ ID NO: 11025 - RNA, 19 nt, synthetic construct
  source 1..19: mol_type = other RNA
tctgaacgtacttctagaa

SEQ ID NO: 11026 - RNA, 19 nt, synthetic construct
  source 1..19: mol_type = other RNA
atctgaacgtacttctaga

SEQ ID NO: 11027 - RNA, 19 nt, synthetic construct
  source 1..19: mol_type = other RNA
catctgaacgtacttctag

SEQ ID NO: 11028 - RNA, 19 nt, synthetic construct
  source 1..19: mol_type = other RNA
gcatctgaacgtacttcta

SEQ ID NO: 11029 - RNA, 19 nt, synthetic construct
  source 1..19: mol_type = other RNA
agcatctgaacgtacttct

SEQ ID NO: 11030 - RNA, 19 nt, synthetic construct
  source 1..19: mol_type = other RNA
aagcatctgaacgtacttc

SEQ ID NO: 11031 - RNA, 19 nt, synthetic construct
  source 1..19: mol_type = other RNA
aaagcatctgaacgtactt

SEQ ID NO: 11032 - RNA, 19 nt, synthetic construct
  source 1..19: mol_type = other RNA
caaagcatctgaacgtact

SEQ ID NO: 11033 - RNA, 19 nt, synthetic construct
  source 1..19: mol_type = other RNA
ccaaagcatctgaacgtac

SEQ ID NO: 11034 - RNA, 19 nt, synthetic construct
  source 1..19: mol_type = other RNA
cccaaagcatctgaacgta

SEQ ID NO: 11035 - RNA, 19 nt, synthetic construct
  source 1..19: mol_type = other RNA
ccccaaagcatctgaacgt

SEQ ID NO: 11036 - RNA, 19 nt, synthetic construct
  source 1..19: mol_type = other RNA
tccccaaagcatctgaacg

SEQ ID NO: 11037 - RNA, 19 nt, synthetic construct
  source 1..19: mol_type = other RNA
ttccccaaagcatctgaac

SEQ ID NO: 11038 - RNA, 19 nt, synthetic construct
  source 1..19: mol_type = other RNA
attccccaaagcatctgaa

SEQ ID NO: 11039 - RNA, 19 nt, synthetic construct
  source 1..19: mol_type = other RNA
cattccccaaagcatctga

SEQ ID NO: 11040 - RNA, 19 nt, synthetic construct
  source 1..19: mol_type = other RNA
gcattccccaaagcatctg

SEQ ID NO: 11041 - RNA, 19 nt, synthetic construct
  source 1..19: mol_type = other RNA
tgcattccccaaagcatct

SEQ ID NO: 11042 - RNA, 19 nt, synthetic construct
  source 1..19: mol_type = other RNA
ttgcattccccaaagcatc

SEQ ID NO: 11043 - RNA, 19 nt, synthetic construct
  source 1..19: mol_type = other RNA
attgcattccccaaagcat

SEQ ID NO: 11044 - RNA, 19 nt, synthetic construct
  source 1..19: mol_type = other RNA
cattgcattccccaaagca

SEQ ID NO: 11045 - RNA, 19 nt, synthetic construct
  source 1..19: mol_type = other RNA
acattgcattccccaaagc

SEQ ID NO: 11046 - RNA, 19 nt, synthetic construct
  source 1..19: mol_type = other RNA
tacattgcattccccaaag

SEQ ID NO: 11047 - RNA, 19 nt, synthetic construct
  source 1..19: mol_type = other RNA
atacattgcattccccaaa

SEQ ID NO: 11048 - RNA, 19 nt, synthetic construct
  source 1..19: mol_type = other RNA
catacattgcattccccaa

SEQ ID NO: 11049 - RNA, 19 nt, synthetic construct
  source 1..19: mol_type = other RNA
tcatacattgcattcccca

SEQ ID NO: 11050 - RNA, 19 nt, synthetic construct
  source 1..19: mol_type = other RNA
atcatacattgcattcccc

SEQ ID NO: 11051 - RNA, 19 nt, synthetic construct
  source 1..19: mol_type = other RNA
aatcatacattgcattccc

SEQ ID NO: 11052 - RNA, 19 nt, synthetic construct
  source 1..19: mol_type = other RNA
aaatcatacattgcattcc

SEQ ID NO: 11053 - RNA, 19 nt, synthetic construct
  source 1..19: mol_type = other RNA
caaatcatacattgcattc

SEQ ID NO: 11054 - RNA, 19 nt, synthetic construct
  source 1..19: mol_type = other RNA
gcaaatcatacattgcatt

SEQ ID NO: 11055 - RNA, 19 nt, synthetic construct
  source 1..19: mol_type = other RNA
agcaaatcatacattgcat

SEQ ID NO: 11056 - RNA, 19 nt, synthetic construct
  source 1..19: mol_type = other RNA
tagcaaatcatacattgca

SEQ ID NO: 11057 - RNA, 19 nt, synthetic construct
  source 1..19: mol_type = other RNA
ctagcaaatcatacattgc

SEQ ID NO: 11058 - RNA, 19 nt, synthetic construct
  source 1..19: mol_type = other RNA
gctagcaaatcatacattg

SEQ ID NO: 11059 - RNA, 19 nt, synthetic construct
  source 1..19: mol_type = other RNA
agctagcaaatcatacatt

SEQ ID NO: 11060 - RNA, 19 nt, synthetic construct
  source 1..19: mol_type = other RNA
gagctagcaaatcatacat

SEQ ID NO: 11061 - RNA, 19 nt, synthetic construct
  source 1..19: mol_type = other RNA
agagctagcaaatcataca

SEQ ID NO: 11062 - RNA, 19 nt, synthetic construct
  source 1..19: mol_type = other RNA
gagagctagcaaatcatac

SEQ ID NO: 11063 - RNA, 19 nt, synthetic construct
  source 1..19: mol_type = other RNA
agagagctagcaaatcata

SEQ ID NO: 11064 - RNA, 19 nt, synthetic construct
  source 1..19: mol_type = other RNA
gagagagctagcaaatcat

SEQ ID NO: 11065 - RNA, 19 nt, synthetic construct
  source 1..19: mol_type = other RNA
tgagagagctagcaaatca

SEQ ID NO: 11066 - RNA, 19 nt, synthetic construct
  source 1..19: mol_type = other RNA
gtgagagagctagcaaatc

SEQ ID NO: 11067 - RNA, 19 nt, synthetic construct
  source 1..19: mol_type = other RNA
ggtgagagagctagcaaat

SEQ ID NO: 11068 - RNA, 19 nt, synthetic construct
  source 1..19: mol_type = other RNA
tggtgagagagctagcaaa

SEQ ID NO: 11069 - RNA, 19 nt, synthetic construct
  source 1..19: mol_type = other RNA
gtggtgagagagctagcaa

SEQ ID NO: 11070 - RNA, 19 nt, synthetic construct
  source 1..19: mol_type = other RNA
agtggtgagagagctagca

SEQ ID NO: 11071 - RNA, 19 nt, synthetic construct
  source 1..19: mol_type = other RNA
aagtggtgagagagctagc

SEQ ID NO: 11072 - RNA, 19 nt, synthetic construct
  source 1..19: mol_type = other RNA
taagtggtgagagagctag

SEQ ID NO: 11073 - RNA, 19 nt, synthetic construct
  source 1..19: mol_type = other RNA
ttaagtggtgagagagcta

SEQ ID NO: 11074 - RNA, 19 nt, synthetic construct
  source 1..19: mol_type = other RNA
gttaagtggtgagagagct

SEQ ID NO: 11075 - RNA, 19 nt, synthetic construct
  source 1..19: mol_type = other RNA
agttaagtggtgagagagc

SEQ ID NO: 11076 - RNA, 19 nt, synthetic construct
  source 1..19: mol_type = other RNA
gagttaagtggtgagagag

SEQ ID NO: 11077 - RNA, 19 nt, synthetic construct
  source 1..19: mol_type = other RNA
tgagttaagtggtgagaga

SEQ ID NO: 11078 - RNA, 19 nt, synthetic construct
  source 1..19: mol_type = other RNA
gtgagttaagtggtgagag

SEQ ID NO: 11079 - RNA, 19 nt, synthetic construct
  source 1..19: mol_type = other RNA
agtgagttaagtggtgaga

SEQ ID NO: 11080 - RNA, 19 nt, synthetic construct
  source 1..19: mol_type = other RNA
cagtgagttaagtggtgag

SEQ ID NO: 11081 - RNA, 19 nt, synthetic construct
  source 1..19: mol_type = other RNA
acagtgagttaagtggtga

SEQ ID NO: 11082 - RNA, 19 nt, synthetic construct
  source 1..19: mol_type = other RNA
cacagtgagttaagtggtg

SEQ ID NO: 11083 - RNA, 19 nt, synthetic construct
  source 1..19: mol_type = other RNA
tcacagtgagttaagtggt

SEQ ID NO: 11084 - RNA, 19 nt, synthetic construct
  source 1..19: mol_type = other RNA
ctcacagtgagttaagtgg

SEQ ID NO: 11085 - RNA, 19 nt, synthetic construct
  source 1..19: mol_type = other RNA
cctcacagtgagttaagtg

SEQ ID NO: 11086 - RNA, 19 nt, synthetic construct
  source 1..19: mol_type = other RNA
tcctcacagtgagttaagt

SEQ ID NO: 11087 - RNA, 19 nt, synthetic construct
  source 1..19: mol_type = other RNA
atcctcacagtgagttaag

SEQ ID NO: 11088 - RNA, 19 nt, synthetic construct
  source 1..19: mol_type = other RNA
tatcctcacagtgagttaa

SEQ ID NO: 11089 - RNA, 19 nt, synthetic construct
  source 1..19: mol_type = other RNA
ttatcctcacagtgagtta

SEQ ID NO: 11090 - RNA, 19 nt, synthetic construct
  source 1..19: mol_type = other RNA
tttatcctcacagtgagtt

SEQ ID NO: 11091 - RNA, 19 nt, synthetic construct
  source 1..19: mol_type = other RNA
atttatcctcacagtgagt

SEQ ID NO: 11092 - RNA, 19 nt, synthetic construct
  source 1..19: mol_type = other RNA
tatttatcctcacagtgag

SEQ ID NO: 11093 - RNA, 19 nt, synthetic construct
  source 1..19: mol_type = other RNA
atatttatcctcacagtga

SEQ ID NO: 11094 - RNA, 19 nt, synthetic construct
  source 1..19: mol_type = other RNA
catatttatcctcacagtg

SEQ ID NO: 11095 - RNA, 19 nt, synthetic construct
  source 1..19: mol_type = other RNA
gcatatttatcctcacagt

SEQ ID NO: 11096 - RNA, 19 nt, synthetic construct
  source 1..19: mol_type = other RNA
tgcatatttatcctcacag

SEQ ID NO: 11097 - RNA, 19 nt, synthetic construct
  source 1..19: mol_type = other RNA
atgcatatttatcctcaca

SEQ ID NO: 11098 - RNA, 19 nt, synthetic construct
  source 1..19: mol_type = other RNA
catgcatatttatcctcac

SEQ ID NO: 11099 - RNA, 19 nt, synthetic construct
  source 1..19: mol_type = other RNA
gcatgcatatttatcctca

SEQ ID NO: 11100 - RNA, 19 nt, synthetic construct
  source 1..19: mol_type = other RNA
agcatgcatatttatcctc

SEQ ID NO: 11101 - RNA, 19 nt, synthetic construct
  source 1..19: mol_type = other RNA
aagcatgcatatttatcct

SEQ ID NO: 11102 - RNA, 19 nt, synthetic construct
  source 1..19: mol_type = other RNA
aaagcatgcatatttatcc

SEQ ID NO: 11103 - RNA, 19 nt, synthetic construct
  source 1..19: mol_type = other RNA
aaaagcatgcatatttatc

SEQ ID NO: 11104 - RNA, 19 nt, synthetic construct
  source 1..19: mol_type = other RNA
aaaaagcatgcatatttat

SEQ ID NO: 11105 - RNA, 19 nt, synthetic construct
  source 1..19: mol_type = other RNA
caaaaagcatgcatattta

SEQ ID NO: 11106 - RNA, 19 nt, synthetic construct
  source 1..19: mol_type = other RNA
acaaaaagcatgcatattt

SEQ ID NO: 11107 - RNA, 19 nt, synthetic construct
  source 1..19: mol_type = other RNA
tacaaaaagcatgcatatt

SEQ ID NO: 11108 - RNA, 19 nt, synthetic construct
  source 1..19: mol_type = other RNA
ttacaaaaagcatgcatat

SEQ ID NO: 11109 - RNA, 19 nt, synthetic construct
  source 1..19: mol_type = other RNA
attacaaaaagcatgcata

SEQ ID NO: 11110 - RNA, 19 nt, synthetic construct
  source 1..19: mol_type = other RNA
aattacaaaaagcatgcat

SEQ ID NO: 11111 - RNA, 19 nt, synthetic construct
  source 1..19: mol_type = other RNA
taattacaaaaagcatgca

SEQ ID NO: 11112 - RNA, 19 nt, synthetic construct
  source 1..19: mol_type = other RNA
ttaattacaaaaagcatgc

SEQ ID NO: 11113 - RNA, 19 nt, synthetic construct
  source 1..19: mol_type = other RNA
gttaattacaaaaagcatg

SEQ ID NO: 11114 - RNA, 19 nt, synthetic construct
  source 1..19: mol_type = other RNA
agttaattacaaaaagcat

SEQ ID NO: 11115 - RNA, 19 nt, synthetic construct
  source 1..19: mol_type = other RNA
cagttaattacaaaaagca

SEQ ID NO: 11116 - RNA, 19 nt, synthetic construct
  source 1..19: mol_type = other RNA
ccagttaattacaaaaagc

SEQ ID NO: 11117 - RNA, 19 nt, synthetic construct
  source 1..19: mol_type = other RNA
accagttaattacaaaaag

SEQ ID NO: 11118 - RNA, 19 nt, synthetic construct
  source 1..19: mol_type = other RNA
caccagttaattacaaaaa

SEQ ID NO: 11119 - RNA, 19 nt, synthetic construct
  source 1..19: mol_type = other RNA
gcaccagttaattacaaaa

SEQ ID NO: 11120 - RNA, 19 nt, synthetic construct
  source 1..19: mol_type = other RNA
agcaccagttaattacaaa

SEQ ID NO: 11121 - RNA, 19 nt, synthetic construct
  source 1..19: mol_type = other RNA
aagcaccagttaattacaa

SEQ ID NO: 11122 - RNA, 19 nt, synthetic construct
  source 1..19: mol_type = other RNA
aaagcaccagttaattaca

SEQ ID NO: 11123 - RNA, 19 nt, synthetic construct
  source 1..19: mol_type = other RNA
caaagcaccagttaattac

SEQ ID NO: 11124 - RNA, 19 nt, synthetic construct
  source 1..19: mol_type = other RNA
tcaaagcaccagttaatta

SEQ ID NO: 11125 - RNA, 19 nt, synthetic construct
  source 1..19: mol_type = other RNA
ttcaaagcaccagttaatt

SEQ ID NO: 11126 - RNA, 19 nt, synthetic construct
  source 1..19: mol_type = other RNA
tttcaaagcaccagttaat

SEQ ID NO: 11127 - RNA, 19 nt, synthetic construct
  source 1..19: mol_type = other RNA
ttttcaaagcaccagttaa

SEQ ID NO: 11128 - RNA, 19 nt, synthetic construct
  source 1..19: mol_type = other RNA
attttcaaagcaccagtta

SEQ ID NO: 11129 - RNA, 19 nt, synthetic construct
  source 1..19: mol_type = other RNA
gattttcaaagcaccagtt

SEQ ID NO: 11130 - RNA, 19 nt, synthetic construct
  source 1..19: mol_type = other RNA
agattttcaaagcaccagt

SEQ ID NO: 11131 - RNA, 19 nt, synthetic construct
  source 1..19: mol_type = other RNA
aagattttcaaagcaccag

SEQ ID NO: 11132 - RNA, 19 nt, synthetic construct
  source 1..19: mol_type = other RNA
aaagattttcaaagcacca

SEQ ID NO: 11133 - RNA, 19 nt, synthetic construct
  source 1..19: mol_type = other RNA
aaaagattttcaaagcacc

SEQ ID NO: 11134 - RNA, 19 nt, synthetic construct
  source 1..19: mol_type = other RNA
aaaaagattttcaaagcac

SEQ ID NO: 11135 - RNA, 19 nt, synthetic construct
  source 1..19: mol_type = other RNA
aaaaaagattttcaaagca

SEQ ID NO: 11136 - RNA, 19 nt, synthetic construct
  source 1..19: mol_type = other RNA
taaaaaagattttcaaagc

SEQ ID NO: 11137 - RNA, 19 nt, synthetic construct
  source 1..19: mol_type = other RNA
ttaaaaaagattttcaaag

SEQ ID NO: 11138 - RNA, 19 nt, synthetic construct
  source 1..19: mol_type = other RNA
cttaaaaaagattttcaaa

SEQ ID NO: 11139 - RNA, 19 nt, synthetic construct
  source 1..19: mol_type = other RNA
ccttaaaaaagattttcaa

SEQ ID NO: 11140 - RNA, 19 nt, synthetic construct
  source 1..19: mol_type = other RNA
cccttaaaaaagattttca

SEQ ID NO: 11141 - RNA, 19 nt, synthetic construct
  source 1..19: mol_type = other RNA
tcccttaaaaaagattttc

SEQ ID NO: 11142 - RNA, 19 nt, synthetic construct
  source 1..19: mol_type = other RNA
ctcccttaaaaaagatttt

SEQ ID NO: 11143 - RNA, 19 nt, synthetic construct
  source 1..19: mol_type = other RNA
tctcccttaaaaaagattt

SEQ ID NO: 11144 - RNA, 19 nt, synthetic construct
  source 1..19: mol_type = other RNA
ttctcccttaaaaaagatt

SEQ ID NO: 11145 - RNA, 19 nt, synthetic construct
  source 1..19: mol_type = other RNA
tttctcccttaaaaaagat

SEQ ID NO: 11146 - RNA, 19 nt, synthetic construct
  source 1..19: mol_type = other RNA
ttttctcccttaaaaaaga

SEQ ID NO: 11147 - RNA, 19 nt, synthetic construct
  source 1..19: mol_type = other RNA
tttttctcccttaaaaaag

SEQ ID NO: 11148 - RNA, 19 nt, synthetic construct
  source 1..19: mol_type = other RNA
atttttctcccttaaaaaa

SEQ ID NO: 11149 - RNA, 19 nt, synthetic construct
  source 1..19: mol_type = other RNA
gatttttctcccttaaaaa

SEQ ID NO: 11150 - RNA, 19 nt, synthetic construct
  source 1..19: mol_type = other RNA
agatttttctcccttaaaa

SEQ ID NO: 11151 - RNA, 19 nt, synthetic construct
  source 1..19: mol_type = other RNA
gagatttttctcccttaaa

SEQ ID NO: 11152 - RNA, 19 nt, synthetic construct
  source 1..19: mol_type = other RNA
tgagatttttctcccttaa

SEQ ID NO: 11153 - RNA, 19 nt, synthetic construct
  source 1..19: mol_type = other RNA
ttgagatttttctccctta

SEQ ID NO: 11154 - RNA, 19 nt, synthetic construct
  source 1..19: mol_type = other RNA
gttgagatttttctccctt

SEQ ID NO: 11155 - RNA, 19 nt, synthetic construct
  source 1..19: mol_type = other RNA
ggttgagatttttctccct

SEQ ID NO: 11156 - RNA, 19 nt, synthetic construct
  source 1..19: mol_type = other RNA
tggttgagatttttctccc

SEQ ID NO: 11157 - RNA, 19 nt, synthetic construct
  source 1..19: mol_type = other RNA
ttggttgagatttttctcc

SEQ ID NO: 11158 - RNA, 19 nt, synthetic construct
  source 1..19: mol_type = other RNA
tttggttgagatttttctc

SEQ ID NO: 11159 - RNA, 19 nt, synthetic construct
  source 1..19: mol_type = other RNA
ctttggttgagatttttct

SEQ ID NO: 11160 - RNA, 19 nt, synthetic construct
  source 1..19: mol_type = other RNA
actttggttgagatttttc

SEQ ID NO: 11161 - RNA, 19 nt, synthetic construct
  source 1..19: mol_type = other RNA
aactttggttgagattttt

SEQ ID NO: 11162 - RNA, 19 nt, synthetic construct
  source 1..19: mol_type = other RNA
taactttggttgagatttt

SEQ ID NO: 11163 - RNA, 19 nt, synthetic construct
  source 1..19: mol_type = other RNA
ataactttggttgagattt

SEQ ID NO: 11164 - RNA, 19 nt, synthetic construct
  source 1..19: mol_type = other RNA
cataactttggttgagatt

SEQ ID NO: 11165 - RNA, 19 nt, synthetic construct
  source 1..19: mol_type = other RNA
gcataactttggttgagat

SEQ ID NO: 11166 - RNA, 19 nt, synthetic construct
  source 1..19: mol_type = other RNA
agcataactttggttgaga

SEQ ID NO: 11167 - RNA, 19 nt, synthetic construct
  source 1..19: mol_type = other RNA
gagcataactttggttgag

SEQ ID NO: 11168 - RNA, 19 nt, synthetic construct
  source 1..19: mol_type = other RNA
tgagcataactttggttga

SEQ ID NO: 11169 - RNA, 19 nt, synthetic construct
  source 1..19: mol_type = other RNA
atgagcataactttggttg

SEQ ID NO: 11170 - RNA, 19 nt, synthetic construct
  source 1..19: mol_type = other RNA
gatgagcataactttggtt

SEQ ID NO: 11171 - RNA, 19 nt, synthetic construct
  source 1..19: mol_type = other RNA
ggatgagcataactttggt

SEQ ID NO: 11172 - RNA, 19 nt, synthetic construct
  source 1..19: mol_type = other RNA
tggatgagcataactttgg

SEQ ID NO: 11173 - RNA, 19 nt, synthetic construct
  source 1..19: mol_type = other RNA
ctggatgagcataactttg

SEQ ID NO: 11174 - RNA, 19 nt, synthetic construct
  source 1..19: mol_type = other RNA
tctggatgagcataacttt

SEQ ID NO: 11175 - RNA, 19 nt, synthetic construct
  source 1..19: mol_type = other RNA
gtctggatgagcataactt

SEQ ID NO: 11176 - RNA, 19 nt, synthetic construct
  source 1..19: mol_type = other RNA
tgtctggatgagcataact

SEQ ID NO: 11177 - RNA, 19 nt, synthetic construct
  source 1..19: mol_type = other RNA
ttgtctggatgagcataac

SEQ ID NO: 11178 - RNA, 19 nt, synthetic construct
  source 1..19: mol_type = other RNA
cttgtctggatgagcataa

SEQ ID NO: 11179 - RNA, 19 nt, synthetic construct
  source 1..19: mol_type = other RNA
gcttgtctggatgagcata

SEQ ID NO: 11180 - RNA, 19 nt, synthetic construct
  source 1..19: mol_type = other RNA
agcttgtctggatgagcat

SEQ ID NO: 11181 - RNA, 19 nt, synthetic construct
  source 1..19: mol_type = other RNA
cagcttgtctggatgagca

SEQ ID NO: 11182 - RNA, 19 nt, synthetic construct
  source 1..19: mol_type = other RNA
tcagcttgtctggatgagc

SEQ ID NO: 11183 - RNA, 19 nt, synthetic construct
  source 1..19: mol_type = other RNA
gtcagcttgtctggatgag

SEQ ID NO: 11184 - RNA, 19 nt, synthetic construct
  source 1..19: mol_type = other RNA
ggtcagcttgtctggatga

SEQ ID NO: 11185 - RNA, 19 nt, synthetic construct
  source 1..19: mol_type = other RNA
aggtcagcttgtctggatg

SEQ ID NO: 11186 - RNA, 19 nt, synthetic construct
  source 1..19: mol_type = other RNA
aaggtcagcttgtctggat

SEQ ID NO: 11187 - RNA, 19 nt, synthetic construct
  source 1..19: mol_type = other RNA
aaaggtcagcttgtctgga

SEQ ID NO: 11188 - RNA, 19 nt, synthetic construct
  source 1..19: mol_type = other RNA
caaaggtcagcttgtctgg

SEQ ID NO: 11189 - RNA, 19 nt, synthetic construct
  source 1..19: mol_type = other RNA
tcaaaggtcagcttgtctg

SEQ ID NO: 11190 - RNA, 19 nt, synthetic construct
  source 1..19: mol_type = other RNA
ctcaaaggtcagcttgtct

SEQ ID NO: 11191 - RNA, 19 nt, synthetic construct
  source 1..19: mol_type = other RNA
actcaaaggtcagcttgtc

SEQ ID NO: 11192 - RNA, 19 nt, synthetic construct
  source 1..19: mol_type = other RNA
aactcaaaggtcagcttgt

SEQ ID NO: 11193 - RNA, 19 nt, synthetic construct
  source 1..19: mol_type = other RNA
taactcaaaggtcagcttg

SEQ ID NO: 11194 - RNA, 19 nt, synthetic construct
  source 1..19: mol_type = other RNA
ttaactcaaaggtcagctt

SEQ ID NO: 11195 - RNA, 19 nt, synthetic construct
  source 1..19: mol_type = other RNA
attaactcaaaggtcagct

SEQ ID NO: 11196 - RNA, 19 nt, synthetic construct
  source 1..19: mol_type = other RNA
aattaactcaaaggtcagc

SEQ ID NO: 11197 - RNA, 19 nt, synthetic construct
  source 1..19: mol_type = other RNA
aaattaactcaaaggtcag

SEQ ID NO: 11198 - RNA, 19 nt, synthetic construct
  source 1..19: mol_type = other RNA
gaaattaactcaaaggtca

SEQ ID NO: 11199 - RNA, 19 nt, synthetic construct
  source 1..19: mol_type = other RNA
tgaaattaactcaaaggtc

SEQ ID NO: 11200 - RNA, 19 nt, synthetic construct
  source 1..19: mol_type = other RNA
ctgaaattaactcaaaggt

SEQ ID NO: 11201 - RNA, 19 nt, synthetic construct
  source 1..19: mol_type = other RNA
gctgaaattaactcaaagg

SEQ ID NO: 11202 - RNA, 19 nt, synthetic construct
  source 1..19: mol_type = other RNA
tgctgaaattaactcaaag

SEQ ID NO: 11203 - RNA, 19 nt, synthetic construct
  source 1..19: mol_type = other RNA
gtgctgaaattaactcaaa

SEQ ID NO: 11204 - RNA, 19 nt, synthetic construct
  source 1..19: mol_type = other RNA
tgtgctgaaattaactcaa

SEQ ID NO: 11205 - RNA, 19 nt, synthetic construct
  source 1..19: mol_type = other RNA
ttgtgctgaaattaactca

SEQ ID NO: 11206 - RNA, 19 nt, synthetic construct
  source 1..19: mol_type = other RNA
gttgtgctgaaattaactc

SEQ ID NO: 11207 - RNA, 19 nt, synthetic construct
  source 1..19: mol_type = other RNA
agttgtgctgaaattaact

SEQ ID NO: 11208 - RNA, 19 nt, synthetic construct
  source 1..19: mol_type = other RNA
gagttgtgctgaaattaac

SEQ ID NO: 11209 - RNA, 19 nt, synthetic construct
  source 1..19: mol_type = other RNA
tgagttgtgctgaaattaa

SEQ ID NO: 11210 - RNA, 19 nt, synthetic construct
  source 1..19: mol_type = other RNA
atgagttgtgctgaaatta

SEQ ID NO: 11211 - RNA, 19 nt, synthetic construct
  source 1..19: mol_type = other RNA
aatgagttgtgctgaaatt

SEQ ID NO: 11212 - RNA, 19 nt, synthetic construct
  source 1..19: mol_type = other RNA
gaatgagttgtgctgaaat

SEQ ID NO: 11213 - RNA, 19 nt, synthetic construct
  source 1..19: mol_type = other RNA
agaatgagttgtgctgaaa

SEQ ID NO: 11214 - RNA, 19 nt, synthetic construct
  source 1..19: mol_type = other RNA
aagaatgagttgtgctgaa

SEQ ID NO: 11215 - RNA, 19 nt, synthetic construct
  source 1..19: mol_type = other RNA
gaagaatgagttgtgctga

SEQ ID NO: 11216 - RNA, 19 nt, synthetic construct
  source 1..19: mol_type = other RNA
tgaagaatgagttgtgctg

SEQ ID NO: 11217 - RNA, 19 nt, synthetic construct
  source 1..19: mol_type = other RNA
ctgaagaatgagttgtgct

SEQ ID NO: 11218 - RNA, 19 nt, synthetic construct
  source 1..19: mol_type = other RNA
actgaagaatgagttgtgc

SEQ ID NO: 11219 - RNA, 19 nt, synthetic construct
  source 1..19: mol_type = other RNA
cactgaagaatgagttgtg

SEQ ID NO: 11220 - RNA, 19 nt, synthetic construct
  source 1..19: mol_type = other RNA
gcactgaagaatgagttgt

SEQ ID NO: 11221 - RNA, 19 nt, synthetic construct
  source 1..19: mol_type = other RNA
ggcactgaagaatgagttg

SEQ ID NO: 11222 - RNA, 19 nt, synthetic construct
  source 1..19: mol_type = other RNA
aggcactgaagaatgagtt

SEQ ID NO: 11223 - RNA, 19 nt, synthetic construct
  source 1..19: mol_type = other RNA
gaggcactgaagaatgagt

SEQ ID NO: 11224 - RNA, 19 nt, synthetic construct
  source 1..19: mol_type = other RNA
tgaggcactgaagaatgag

SEQ ID NO: 11225 - RNA, 19 nt, synthetic construct
  source 1..19: mol_type = other RNA
atgaggcactgaagaatga

SEQ ID NO: 11226 - RNA, 19 nt, synthetic construct
  source 1..19: mol_type = other RNA
catgaggcactgaagaatg

SEQ ID NO: 11227 - RNA, 19 nt, synthetic construct
  source 1..19: mol_type = other RNA
tcatgaggcactgaagaat

SEQ ID NO: 11228 - RNA, 19 nt, synthetic construct
  source 1..19: mol_type = other RNA
gtcatgaggcactgaagaa

SEQ ID NO: 11229 - RNA, 19 nt, synthetic construct
  source 1..19: mol_type = other RNA
agtcatgaggcactgaaga

SEQ ID NO: 11230 - RNA, 19 nt, synthetic construct
  source 1..19: mol_type = other RNA
cagtcatgaggcactgaag

SEQ ID NO: 11231 - RNA, 19 nt, synthetic construct
  source 1..19: mol_type = other RNA
tcagtcatgaggcactgaa

SEQ ID NO: 11232 - RNA, 19 nt, synthetic construct
  source 1..19: mol_type = other RNA
ttcagtcatgaggcactga

SEQ ID NO: 11233 - RNA, 19 nt, synthetic construct
  source 1..19: mol_type = other RNA
tttcagtcatgaggcactg

SEQ ID NO: 11234 - RNA, 19 nt, synthetic construct
  source 1..19: mol_type = other RNA
ttttcagtcatgaggcact

SEQ ID NO: 11235 - RNA, 19 nt, synthetic construct
  source 1..19: mol_type = other RNA
gttttcagtcatgaggcac

SEQ ID NO: 11236 - RNA, 19 nt, synthetic construct
  source 1..19: mol_type = other RNA
tgttttcagtcatgaggca

SEQ ID NO: 11237 - RNA, 19 nt, synthetic construct
  source 1..19: mol_type = other RNA
ttgttttcagtcatgaggc

SEQ ID NO: 11238 - RNA, 19 nt, synthetic construct
  source 1..19: mol_type = other RNA
tttgttttcagtcatgagg

SEQ ID NO: 11239 - RNA, 19 nt, synthetic construct
  source 1..19: mol_type = other RNA
ttttgttttcagtcatgag

SEQ ID NO: 11240 - RNA, 19 nt, synthetic construct
  source 1..19: mol_type = other RNA
tttttgttttcagtcatga

SEQ ID NO: 11241 - RNA, 19 nt, synthetic construct
  source 1..19: mol_type = other RNA
ttttttgttttcagtcatg

SEQ ID NO: 11242 - RNA, 19 nt, synthetic construct
  source 1..19: mol_type = other RNA
gttttttgttttcagtcat

SEQ ID NO: 11243 - RNA, 19 nt, synthetic construct
  source 1..19: mol_type = other RNA
tgttttttgttttcagtca

SEQ ID NO: 11244 - RNA, 19 nt, synthetic construct
  source 1..19: mol_type = other RNA
ttgttttttgttttcagtc

SEQ ID NO: 11245 - RNA, 19 nt, synthetic construct
  source 1..19: mol_type = other RNA
tttgttttttgttttcagt

SEQ ID NO: 11246 - RNA, 19 nt, synthetic construct
  source 1..19: mol_type = other RNA
ttttgttttttgttttcag

SEQ ID NO: 11247 - RNA, 19 nt, synthetic construct
  source 1..19: mol_type = other RNA
tttttgttttttgttttca

SEQ ID NO: 11248 - RNA, 19 nt, synthetic construct
  source 1..19: mol_type = other RNA
ttttttgttttttgttttc

SEQ ID NO: 11249 - RNA, 19 nt, synthetic construct
  source 1..19: mol_type = other RNA
tttttttgttttttgtttt

SEQ ID NO: 11250 - RNA, 19 nt, synthetic construct
  source 1..19: mol_type = other RNA
gtttttttgttttttgttt

SEQ ID NO: 11251 - RNA, 19 nt, synthetic construct
  source 1..19: mol_type = other RNA
cgtttttttgttttttgtt

SEQ ID NO: 11252 - RNA, 19 nt, synthetic construct
  source 1..19: mol_type = other RNA
tcgtttttttgttttttgt

SEQ ID NO: 11253 - RNA, 19 nt, synthetic construct
  source 1..19: mol_type = other RNA
ttcgtttttttgttttttg

SEQ ID NO: 11254 - RNA, 19 nt, synthetic construct
  source 1..19: mol_type = other RNA
tttcgtttttttgtttttt

SEQ ID NO: 11255 - RNA, 19 nt, synthetic construct
  source 1..19: mol_type = other RNA
ctttcgtttttttgttttt

SEQ ID NO: 11256 - RNA, 19 nt, synthetic construct
  source 1..19: mol_type = other RNA
gctttcgtttttttgtttt

SEQ ID NO: 11257 - RNA, 19 nt, synthetic construct
  source 1..19: mol_type = other RNA
tgctttcgtttttttgttt

SEQ ID NO: 11258 - RNA, 19 nt, synthetic construct
  source 1..19: mol_type = other RNA
atgctttcgtttttttgtt

SEQ ID NO: 11259 - RNA, 19 nt, synthetic construct
  source 1..19: mol_type = other RNA
gatgctttcgtttttttgt

SEQ ID NO: 11260 - RNA, 19 nt, synthetic construct
  source 1..19: mol_type = other RNA
agatgctttcgtttttttg

SEQ ID NO: 11261 - RNA, 19 nt, synthetic construct
  source 1..19: mol_type = other RNA
aagatgctttcgttttttt

SEQ ID NO: 11262 - RNA, 19 nt, synthetic construct
  source 1..19: mol_type = other RNA
gaagatgctttcgtttttt

SEQ ID NO: 11263 - RNA, 19 nt, synthetic construct
  source 1..19: mol_type = other RNA
tgaagatgctttcgttttt

SEQ ID NO: 11264 - RNA, 19 nt, synthetic construct
  source 1..19: mol_type = other RNA
gtgaagatgctttcgtttt

SEQ ID NO: 11265 - RNA, 19 nt, synthetic construct
  source 1..19: mol_type = other RNA
tgtgaagatgctttcgttt

SEQ ID NO: 11266 - RNA, 19 nt, synthetic construct
  source 1..19: mol_type = other RNA
ttgtgaagatgctttcgtt

SEQ ID NO: 11267 - RNA, 19 nt, synthetic construct
  source 1..19: mol_type = other RNA
attgtgaagatgctttcgt

SEQ ID NO: 11268 - RNA, 19 nt, synthetic construct
  source 1..19: mol_type = other RNA
cattgtgaagatgctttcg

SEQ ID NO: 11269 - RNA, 19 nt, synthetic construct
  source 1..19: mol_type = other RNA
tcattgtgaagatgctttc

SEQ ID NO: 11270 - RNA, 19 nt, synthetic construct
  source 1..19: mol_type = other RNA
ttcattgtgaagatgcttt

SEQ ID NO: 11271 - RNA, 19 nt, synthetic construct
  source 1..19: mol_type = other RNA
cttcattgtgaagatgctt

SEQ ID NO: 11272 - RNA, 19 nt, synthetic construct
  source 1..19: mol_type = other RNA
gcttcattgtgaagatgct

SEQ ID NO: 11273 - RNA, 19 nt, synthetic construct
  source 1..19: mol_type = other RNA
agcttcattgtgaagatgc

SEQ ID NO: 11274 - RNA, 19 nt, synthetic construct
  source 1..19: mol_type = other RNA
aagcttcattgtgaagatg

SEQ ID NO: 11275 - RNA, 19 nt, synthetic construct
  source 1..19: mol_type = other RNA
gaagcttcattgtgaagat

SEQ ID NO: 11276 - RNA, 19 nt, synthetic construct
  source 1..19: mol_type = other RNA
ggaagcttcattgtgaaga

SEQ ID NO: 11277 - RNA, 19 nt, synthetic construct
  source 1..19: mol_type = other RNA
tggaagcttcattgtgaag

SEQ ID NO: 11278 - RNA, 19 nt, synthetic construct
  source 1..19: mol_type = other RNA
ctggaagcttcattgtgaa

SEQ ID NO: 11279 - RNA, 19 nt, synthetic construct
  source 1..19: mol_type = other RNA
tctggaagcttcattgtga

SEQ ID NO: 11280 - RNA, 19 nt, synthetic construct
  source 1..19: mol_type = other RNA
atctggaagcttcattgtg

SEQ ID NO: 11281 - RNA, 19 nt, synthetic construct
  source 1..19: mol_type = other RNA
tatctggaagcttcattgt

SEQ ID NO: 11282 - RNA, 19 nt, synthetic construct
  source 1..19: mol_type = other RNA
ctatctggaagcttcattg

SEQ ID NO: 11283 - RNA, 19 nt, synthetic construct
  source 1..19: mol_type = other RNA
gctatctggaagcttcatt

SEQ ID NO: 11284 - RNA, 19 nt, synthetic construct
  source 1..19: mol_type = other RNA
tgctatctggaagcttcat

SEQ ID NO: 11285 - RNA, 19 nt, synthetic construct
  source 1..19: mol_type = other RNA
gtgctatctggaagcttca

SEQ ID NO: 11286 - RNA, 19 nt, synthetic construct
  source 1..19: mol_type = other RNA
ggtgctatctggaagcttc

SEQ ID NO: 11287 - RNA, 19 nt, synthetic construct
  source 1..19: mol_type = other RNA
cggtgctatctggaagctt

SEQ ID NO: 11288 - RNA, 19 nt, synthetic construct
  source 1..19: mol_type = other RNA
acggtgctatctggaagct

SEQ ID NO: 11289 - RNA, 19 nt, synthetic construct
  source 1..19: mol_type = other RNA
aacggtgctatctggaagc

SEQ ID NO: 11290 - RNA, 19 nt, synthetic construct
  source 1..19: mol_type = other RNA
aaacggtgctatctggaag

SEQ ID NO: 11291 - RNA, 19 nt, synthetic construct
  source 1..19: mol_type = other RNA
aaaacggtgctatctggaa

SEQ ID NO: 11292 - RNA, 19 nt, synthetic construct
  source 1..19: mol_type = other RNA
caaaacggtgctatctgga

SEQ ID NO: 11293 - RNA, 19 nt, synthetic construct
  source 1..19: mol_type = other RNA
gcaaaacggtgctatctgg

SEQ ID NO: 11294 - RNA, 19 nt, synthetic construct
  source 1..19: mol_type = other RNA
agcaaaacggtgctatctg

SEQ ID NO: 11295 - RNA, 19 nt, synthetic construct
  source 1..19: mol_type = other RNA
tagcaaaacggtgctatct

SEQ ID NO: 11296 - RNA, 19 nt, synthetic construct
  source 1..19: mol_type = other RNA
ttagcaaaacggtgctatc

SEQ ID NO: 11297 - RNA, 19 nt, synthetic construct
  source 1..19: mol_type = other RNA
tttagcaaaacggtgctat

SEQ ID NO: 11298 - RNA, 19 nt, synthetic construct
  source 1..19: mol_type = other RNA
ttttagcaaaacggtgcta

SEQ ID NO: 11299 - RNA, 19 nt, synthetic construct
  source 1..19: mol_type = other RNA
cttttagcaaaacggtgct

SEQ ID NO: 11300 - RNA, 19 nt, synthetic construct
  source 1..19: mol_type = other RNA
tcttttagcaaaacggtgc

SEQ ID NO: 11301 - RNA, 19 nt, synthetic construct
  source 1..19: mol_type = other RNA
atcttttagcaaaacggtg

SEQ ID NO: 11302 - RNA, 19 nt, synthetic construct
  source 1..19: mol_type = other RNA
tatcttttagcaaaacggt

SEQ ID NO: 11303 - RNA, 19 nt, synthetic construct
  source 1..19: mol_type = other RNA
gtatcttttagcaaaacgg

SEQ ID NO: 11304 - RNA, 19 nt, synthetic construct
  source 1..19: mol_type = other RNA
tgtatcttttagcaaaacg

SEQ ID NO: 11305 - RNA, 19 nt, synthetic construct
  source 1..19: mol_type = other RNA
atgtatcttttagcaaaac

SEQ ID NO: 11306 - RNA, 19 nt, synthetic construct
  source 1..19: mol_type = other RNA
aatgtatcttttagcaaaa

SEQ ID NO: 11307 - RNA, 19 nt, synthetic construct
  source 1..19: mol_type = other RNA
gaatgtatcttttagcaaa

SEQ ID NO: 11308 - RNA, 19 nt, synthetic construct
  source 1..19: mol_type = other RNA
agaatgtatcttttagcaa

SEQ ID NO: 11309 - RNA, 19 nt, synthetic construct
  source 1..19: mol_type = other RNA
gagaatgtatcttttagca

SEQ ID NO: 11310 - RNA, 19 nt, synthetic construct
  source 1..19: mol_type = other RNA
tgagaatgtatcttttagc

SEQ ID NO: 11311 - RNA, 19 nt, synthetic construct
  source 1..19: mol_type = other RNA
atgagaatgtatcttttag

SEQ ID NO: 11312 - RNA, 19 nt, synthetic construct
  source 1..19: mol_type = other RNA
aatgagaatgtatctttta

SEQ ID NO: 11313 - RNA, 19 nt, synthetic construct
  source 1..19: mol_type = other RNA
caatgagaatgtatctttt

SEQ ID NO: 11314 - RNA, 19 nt, synthetic construct
  source 1..19: mol_type = other RNA
acaatgagaatgtatcttt

SEQ ID NO: 11315 - RNA, 19 nt, synthetic construct
  source 1..19: mol_type = other RNA
aacaatgagaatgtatctt

SEQ ID NO: 11316 - RNA, 19 nt, synthetic construct
  source 1..19: mol_type = other RNA
aaacaatgagaatgtatct

SEQ ID NO: 11317 - RNA, 19 nt, synthetic construct
  source 1..19: mol_type = other RNA
aaaacaatgagaatgtatc

SEQ ID NO: 11318 - RNA, 19 nt, synthetic construct
  source 1..19: mol_type = other RNA
gaaaacaatgagaatgtat

SEQ ID NO: 11319 - RNA, 19 nt, synthetic construct
  source 1..19: mol_type = other RNA
ggaaaacaatgagaatgta

SEQ ID NO: 11320 - RNA, 19 nt, synthetic construct
  source 1..19: mol_type = other RNA
tggaaaacaatgagaatgt

SEQ ID NO: 11321 - RNA, 19 nt, synthetic construct
  source 1..19: mol_type = other RNA
ttggaaaacaatgagaatg

SEQ ID NO: 11322 - RNA, 19 nt, synthetic construct
  source 1..19: mol_type = other RNA
gttggaaaacaatgagaat

SEQ ID NO: 11323 - RNA, 19 nt, synthetic construct
  source 1..19: mol_type = other RNA
tgttggaaaacaatgagaa

SEQ ID NO: 11324 - RNA, 19 nt, synthetic construct
  source 1..19: mol_type = other RNA
ctgttggaaaacaatgaga

SEQ ID NO: 11325 - RNA, 19 nt, synthetic construct
  source 1..19: mol_type = other RNA
actgttggaaaacaatgag

SEQ ID NO: 11326 - RNA, 19 nt, synthetic construct
  source 1..19: mol_type = other RNA
cactgttggaaaacaatga

SEQ ID NO: 11327 - RNA, 19 nt, synthetic construct
  source 1..19: mol_type = other RNA
tcactgttggaaaacaatg

SEQ ID NO: 11328 - RNA, 19 nt, synthetic construct
  source 1..19: mol_type = other RNA
atcactgttggaaaacaat

SEQ ID NO: 11329 - RNA, 19 nt, synthetic construct
  source 1..19: mol_type = other RNA
catcactgttggaaaacaa

SEQ ID NO: 11330 - RNA, 19 nt, synthetic construct
  source 1..19: mol_type = other RNA
ccatcactgttggaaaaca

SEQ ID NO: 11331 - RNA, 19 nt, synthetic construct
  source 1..19: mol_type = other RNA
gccatcactgttggaaaac

SEQ ID NO: 11332 - RNA, 19 nt, synthetic construct
  source 1..19: mol_type = other RNA
agccatcactgttggaaaa

SEQ ID NO: 11333 - RNA, 19 nt, synthetic construct
  source 1..19: mol_type = other RNA
aagccatcactgttggaaa

SEQ ID NO: 11334 - RNA, 19 nt, synthetic construct
  source 1..19: mol_type = other RNA
gaagccatcactgttggaa

SEQ ID NO: 11335 - RNA, 19 nt, synthetic construct
  source 1..19: mol_type = other RNA
ggaagccatcactgttgga

SEQ ID NO: 11336 - RNA, 19 nt, synthetic construct
  source 1..19: mol_type = other RNA
tggaagccatcactgttgg

SEQ ID NO: 11337 - RNA, 19 nt, synthetic construct
  source 1..19: mol_type = other RNA
gtggaagccatcactgttg

SEQ ID NO: 11338 - RNA, 19 nt, synthetic construct
  source 1..19: mol_type = other RNA
tgtggaagccatcactgtt

SEQ ID NO: 11339 - RNA, 19 nt, synthetic construct
  source 1..19: mol_type = other RNA
atgtggaagccatcactgt

SEQ ID NO: 11340 - RNA, 19 nt, synthetic construct
  source 1..19: mol_type = other RNA
tatgtggaagccatcactg

SEQ ID NO: 11341 - RNA, 19 nt, synthetic construct
  source 1..19: mol_type = other RNA
ttatgtggaagccatcact

SEQ ID NO: 11342 - RNA, 19 nt, synthetic construct
  source 1..19: mol_type = other RNA
cttatgtggaagccatcac

SEQ ID NO: 11343 - RNA, 19 nt, synthetic construct
  source 1..19: mol_type = other RNA
ccttatgtggaagccatca

SEQ ID NO: 11344 - RNA, 19 nt, synthetic construct
  source 1..19: mol_type = other RNA
accttatgtggaagccatc

SEQ ID NO: 11345 - RNA, 19 nt, synthetic construct
  source 1..19: mol_type = other RNA
aaccttatgtggaagccat

SEQ ID NO: 11346 - RNA, 19 nt, synthetic construct
  source 1..19: mol_type = other RNA
taaccttatgtggaagcca

SEQ ID NO: 11347 - RNA, 19 nt, synthetic construct
  source 1..19: mol_type = other RNA
ttaaccttatgtggaagcc

SEQ ID NO: 11348 - RNA, 19 nt, synthetic construct
  source 1..19: mol_type = other RNA
tttaaccttatgtggaagc

SEQ ID NO: 11349 - RNA, 19 nt, synthetic construct
  source 1..19: mol_type = other RNA
gtttaaccttatgtggaag

SEQ ID NO: 11350 - RNA, 19 nt, synthetic construct
  source 1..19: mol_type = other RNA
tgtttaaccttatgtggaa

SEQ ID NO: 11351 - RNA, 19 nt, synthetic construct
  source 1..19: mol_type = other RNA
ttgtttaaccttatgtgga

SEQ ID NO: 11352 - RNA, 19 nt, synthetic construct
  source 1..19: mol_type = other RNA
tttgtttaaccttatgtgg

SEQ ID NO: 11353 - RNA, 19 nt, synthetic construct
  source 1..19: mol_type = other RNA
gtttgtttaaccttatgtg

SEQ ID NO: 11354 - RNA, 19 nt, synthetic construct
  source 1..19: mol_type = other RNA
agtttgtttaaccttatgt

SEQ ID NO: 11355 - RNA, 19 nt, synthetic construct
  source 1..19: mol_type = other RNA
tagtttgtttaaccttatg

SEQ ID NO: 11356 - RNA, 19 nt, synthetic construct
  source 1..19: mol_type = other RNA
ctagtttgtttaaccttat

SEQ ID NO: 11357 - RNA, 19 nt, synthetic construct
  source 1..19: mol_type = other RNA
cctagtttgtttaacctta

SEQ ID NO: 11358 - RNA, 19 nt, synthetic construct
  source 1..19: mol_type = other RNA
acctagtttgtttaacctt

SEQ ID NO: 11359 - RNA, 19 nt, synthetic construct
  source 1..19: mol_type = other RNA
cacctagtttgtttaacct

SEQ ID NO: 11360 - RNA, 19 nt, synthetic construct
  source 1..19: mol_type = other RNA
gcacctagtttgtttaacc

SEQ ID NO: 11361 - RNA, 19 nt, synthetic construct
  source 1..19: mol_type = other RNA
agcacctagtttgtttaac

SEQ ID NO: 11362 - RNA, 19 nt, synthetic construct
  source 1..19: mol_type = other RNA
aagcacctagtttgtttaa

SEQ ID NO: 11363 - RNA, 19 nt, synthetic construct
  source 1..19: mol_type = other RNA
caagcacctagtttgttta

SEQ ID NO: 11364 - RNA, 19 nt, synthetic construct
  source 1..19: mol_type = other RNA
acaagcacctagtttgttt

SEQ ID NO: 11365 - RNA, 19 nt, synthetic construct
  source 1..19: mol_type = other RNA
tacaagcacctagtttgtt

SEQ ID NO: 11366 - RNA, 19 nt, synthetic construct
  source 1..19: mol_type = other RNA
ttacaagcacctagtttgt

SEQ ID NO: 11367 - RNA, 19 nt, synthetic construct
  source 1..19: mol_type = other RNA
tttacaagcacctagtttg

SEQ ID NO: 11368 - RNA, 19 nt, synthetic construct
  source 1..19: mol_type = other RNA
atttacaagcacctagttt

SEQ ID NO: 11369 - RNA, 19 nt, synthetic construct
  source 1..19: mol_type = other RNA
tatttacaagcacctagtt

SEQ ID NO: 11370 - RNA, 19 nt, synthetic construct
  source 1..19: mol_type = other RNA
ttatttacaagcacctagt

SEQ ID NO: 11371 - RNA, 19 nt, synthetic construct
  source 1..19: mol_type = other RNA
attatttacaagcacctag

SEQ ID NO: 11372 - RNA, 19 nt, synthetic construct
  source 1..19: mol_type = other RNA
aattatttacaagcaccta

SEQ ID NO: 11373 - RNA, 19 nt, synthetic construct
  source 1..19: mol_type = other RNA
aaattatttacaagcacct

SEQ ID NO: 11374 - RNA, 19 nt, synthetic construct
  source 1..19: mol_type = other RNA
taaattatttacaagcacc

SEQ ID NO: 11375 - RNA, 19 nt, synthetic construct
  source 1..19: mol_type = other RNA
ataaattatttacaagcac

SEQ ID NO: 11376 - RNA, 19 nt, synthetic construct
  source 1..19: mol_type = other RNA
aataaattatttacaagca

SEQ ID NO: 11377 - RNA, 19 nt, synthetic construct
  source 1..19: mol_type = other RNA
taataaattatttacaagc

SEQ ID NO: 11378 - RNA, 19 nt, synthetic construct
  source 1..19: mol_type = other RNA
gtaataaattatttacaag

SEQ ID NO: 11379 - RNA, 19 nt, synthetic construct
  source 1..19: mol_type = other RNA
tgtaataaattatttacaa

SEQ ID NO: 11380 - RNA, 19 nt, synthetic construct
  source 1..19: mol_type = other RNA
ctgtaataaattatttaca

SEQ ID NO: 11381 - RNA, 19 nt, synthetic construct
  source 1..19: mol_type = other RNA
actgtaataaattatttac

SEQ ID NO: 11382 - RNA, 19 nt, synthetic construct
  source 1..19: mol_type = other RNA
aactgtaataaattattta

SEQ ID NO: 11383 - RNA, 19 nt, synthetic construct
  source 1..19: mol_type = other RNA
aaactgtaataaattattt

SEQ ID NO: 11384 - RNA, 19 nt, synthetic construct
  source 1..19: mol_type = other RNA
taaactgtaataaattatt

SEQ ID NO: 11385 - RNA, 19 nt, synthetic construct
  source 1..19: mol_type = other RNA
gtaaactgtaataaattat

SEQ ID NO: 11386 - RNA, 19 nt, synthetic construct
  source 1..19: mol_type = other RNA
agtaaactgtaataaatta

SEQ ID NO: 11387 - RNA, 19 nt, synthetic construct
  source 1..19: mol_type = other RNA
gagtaaactgtaataaatt

SEQ ID NO: 11388 - RNA, 19 nt, synthetic construct
  source 1..19: mol_type = other RNA
agagtaaactgtaataaat

SEQ ID NO: 11389 - RNA, 19 nt, synthetic construct
  source 1..19: mol_type = other RNA
tagagtaaactgtaataaa

SEQ ID NO: 11390 - RNA, 19 nt, synthetic construct
  source 1..19: mol_type = other RNA
atagagtaaactgtaataa

SEQ ID NO: 11391 - RNA, 19 nt, synthetic construct
  source 1..19: mol_type = other RNA
gatagagtaaactgtaata

SEQ ID NO: 11392 - RNA, 19 nt, synthetic construct
  source 1..19: mol_type = other RNA
cgatagagtaaactgtaat

SEQ ID NO: 11393 - RNA, 19 nt, synthetic construct
  source 1..19: mol_type = other RNA
gcgatagagtaaactgtaa

SEQ ID NO: 11394 - RNA, 19 nt, synthetic construct
  source 1..19: mol_type = other RNA
tgcgatagagtaaactgta

SEQ ID NO: 11395 - RNA, 19 nt, synthetic construct
  source 1..19: mol_type = other RNA
atgcgatagagtaaactgt

SEQ ID NO: 11396 - RNA, 19 nt, synthetic construct
  source 1..19: mol_type = other RNA
aatgcgatagagtaaactg

SEQ ID NO: 11397 - RNA, 19 nt, synthetic construct
  source 1..19: mol_type = other RNA
aaatgcgatagagtaaact

SEQ ID NO: 11398 - RNA, 19 nt, synthetic construct
  source 1..19: mol_type = other RNA
gaaatgcgatagagtaaac

SEQ ID NO: 11399 - RNA, 19 nt, synthetic construct
  source 1..19: mol_type = other RNA
agaaatgcgatagagtaaa

SEQ ID NO: 11400 - RNA, 19 nt, synthetic construct
  source 1..19: mol_type = other RNA
cagaaatgcgatagagtaa

SEQ ID NO: 11401 - RNA, 19 nt, synthetic construct
  source 1..19: mol_type = other RNA
acagaaatgcgatagagta

SEQ ID NO: 11402 - RNA, 19 nt, synthetic construct
  source 1..19: mol_type = other RNA
tacagaaatgcgatagagt

SEQ ID NO: 11403 - RNA, 19 nt, synthetic construct
  source 1..19: mol_type = other RNA
ttacagaaatgcgatagag

SEQ ID NO: 11404 - RNA, 19 nt, synthetic construct
  source 1..19: mol_type = other RNA
gttacagaaatgcgataga

SEQ ID NO: 11405 - RNA, 19 nt, synthetic construct
  source 1..19: mol_type = other RNA
tgttacagaaatgcgatag

SEQ ID NO: 11406 - RNA, 19 nt, synthetic construct
  source 1..19: mol_type = other RNA
atgttacagaaatgcgata

SEQ ID NO: 11407 - RNA, 19 nt, synthetic construct
  source 1..19: mol_type = other RNA
catgttacagaaatgcgat

SEQ ID NO: 11408 - RNA, 19 nt, synthetic construct
  source 1..19: mol_type = other RNA
tcatgttacagaaatgcga

SEQ ID NO: 11409 - RNA, 19 nt, synthetic construct
  source 1..19: mol_type = other RNA
ttcatgttacagaaatgcg

SEQ ID NO: 11410 - RNA, 19 nt, synthetic construct
  source 1..19: mol_type = other RNA
tttcatgttacagaaatgc

SEQ ID NO: 11411 - RNA, 19 nt, synthetic construct
  source 1..19: mol_type = other RNA
atttcatgttacagaaatg

SEQ ID NO: 11412 - RNA, 19 nt, synthetic construct
  source 1..19: mol_type = other RNA
catttcatgttacagaaat

SEQ ID NO: 11413 - RNA, 19 nt, synthetic construct
  source 1..19: mol_type = other RNA
gcatttcatgttacagaaa

SEQ ID NO: 11414 - RNA, 19 nt, synthetic construct
  source 1..19: mol_type = other RNA
tgcatttcatgttacagaa

SEQ ID NO: 11415 - RNA, 19 nt, synthetic construct
  source 1..19: mol_type = other RNA
atgcatttcatgttacaga

SEQ ID NO: 11416 - RNA, 19 nt, synthetic construct
  source 1..19: mol_type = other RNA
catgcatttcatgttacag

SEQ ID NO: 11417 - RNA, 19 nt, synthetic construct
  source 1..19: mol_type = other RNA
gcatgcatttcatgttaca

SEQ ID NO: 11418 - RNA, 19 nt, synthetic construct
  source 1..19: mol_type = other RNA
ggcatgcatttcatgttac

SEQ ID NO: 11419 - RNA, 19 nt, synthetic construct
  source 1..19: mol_type = other RNA
gggcatgcatttcatgtta

SEQ ID NO: 11420 - RNA, 19 nt, synthetic construct
  source 1..19: mol_type = other RNA
agggcatgcatttcatgtt

SEQ ID NO: 11421 - RNA, 19 nt, synthetic construct
  source 1..19: mol_type = other RNA
aagggcatgcatttcatgt

SEQ ID NO: 11422 - RNA, 19 nt, synthetic construct
  source 1..19: mol_type = other RNA
gaagggcatgcatttcatg

SEQ ID NO: 11423 - RNA, 19 nt, synthetic construct
  source 1..19: mol_type = other RNA
agaagggcatgcatttcat

SEQ ID NO: 11424 - RNA, 19 nt, synthetic construct
  source 1..19: mol_type = other RNA
aagaagggcatgcatttca

SEQ ID NO: 11425 - RNA, 19 nt, synthetic construct
  source 1..19: mol_type = other RNA
gaagaagggcatgcatttc

SEQ ID NO: 11426 - RNA, 19 nt, synthetic construct
  source 1..19: mol_type = other RNA
tgaagaagggcatgcattt

SEQ ID NO: 11427 - RNA, 19 nt, synthetic construct
  source 1..19: mol_type = other RNA
ctgaagaagggcatgcatt

SEQ ID NO: 11428 - RNA, 19 nt, synthetic construct
  source 1..19: mol_type = other RNA
cctgaagaagggcatgcat

SEQ ID NO: 11429 - RNA, 19 nt, synthetic construct
  source 1..19: mol_type = other RNA
ccctgaagaagggcatgca

SEQ ID NO: 11430 - RNA, 19 nt, synthetic construct
  source 1..19: mol_type = other RNA
cccctgaagaagggcatgc

SEQ ID NO: 11431 - RNA, 19 nt, synthetic construct
  source 1..19: mol_type = other RNA
tcccctgaagaagggcatg

SEQ ID NO: 11432 - RNA, 19 nt, synthetic construct
  source 1..19: mol_type = other RNA
ttcccctgaagaagggcat

SEQ ID NO: 11433 - RNA, 19 nt, synthetic construct
  source 1..19: mol_type = other RNA
cttcccctgaagaagggca

SEQ ID NO: 11434 - RNA, 19 nt, synthetic construct
  source 1..19: mol_type = other RNA
tcttcccctgaagaagggc

SEQ ID NO: 11435 - RNA, 19 nt, synthetic construct
  source 1..19: mol_type = other RNA
gtcttcccctgaagaaggg

SEQ ID NO: 11436 - RNA, 19 nt, synthetic construct
  source 1..19: mol_type = other RNA
agtcttcccctgaagaagg

SEQ ID NO: 11437 - RNA, 19 nt, synthetic construct
  source 1..19: mol_type = other RNA
cagtcttcccctgaagaag

SEQ ID NO: 11438 - RNA, 19 nt, synthetic construct
  source 1..19: mol_type = other RNA
acagtcttcccctgaagaa

SEQ ID NO: 11439 - RNA, 19 nt, synthetic construct
  source 1..19: mol_type = other RNA
cacagtcttcccctgaaga

SEQ ID NO: 11440 - RNA, 19 nt, synthetic construct
  source 1..19: mol_type = other RNA
ccacagtcttcccctgaag

SEQ ID NO: 11441 - RNA, 19 nt, synthetic construct
  source 1..19: mol_type = other RNA
accacagtcttcccctgaa

SEQ ID NO: 11442 - RNA, 19 nt, synthetic construct
  source 1..19: mol_type = other RNA
gaccacagtcttcccctga

SEQ ID NO: 11443 - RNA, 19 nt, synthetic construct
  source 1..19: mol_type = other RNA
tgaccacagtcttcccctg

SEQ ID NO: 11444 - RNA, 19 nt, synthetic construct
  source 1..19: mol_type = other RNA
ttgaccacagtcttcccct

SEQ ID NO: 11445 - RNA, 19 nt, synthetic construct
  source 1..19: mol_type = other RNA
cttgaccacagtcttcccc

SEQ ID NO: 11446 - RNA, 19 nt, synthetic construct
  source 1..19: mol_type = other RNA
acttgaccacagtcttccc

SEQ ID NO: 11447 - RNA, 19 nt, synthetic construct
  source 1..19: mol_type = other RNA
aacttgaccacagtcttcc

SEQ ID NO: 11448 - RNA, 19 nt, synthetic construct
  source 1..19: mol_type = other RNA
taacttgaccacagtcttc

SEQ ID NO: 11449 - RNA, 19 nt, synthetic construct
  source 1..19: mol_type = other RNA
ttaacttgaccacagtctt

SEQ ID NO: 11450 - RNA, 19 nt, synthetic construct
  source 1..19: mol_type = other RNA
tttaacttgaccacagtct

SEQ ID NO: 11451 - RNA, 19 nt, synthetic construct
  source 1..19: mol_type = other RNA
ttttaacttgaccacagtc

SEQ ID NO: 11452 - RNA, 19 nt, synthetic construct
  source 1..19: mol_type = other RNA
tttttaacttgaccacagt

SEQ ID NO: 11453 - RNA, 19 nt, synthetic construct
  source 1..19: mol_type = other RNA
ttttttaacttgaccacag

SEQ ID NO: 11454 - RNA, 19 nt, synthetic construct
  source 1..19: mol_type = other RNA
tttttttaacttgaccaca

SEQ ID NO: 11455 - RNA, 19 nt, synthetic construct
  source 1..19: mol_type = other RNA
ttttttttaacttgaccac

SEQ ID NO: 11456 - RNA, 19 nt, synthetic construct
  source 1..19: mol_type = other RNA
tttttttttaacttgacca

SEQ ID NO: 11457 - RNA, 19 nt, synthetic construct
  source 1..19: mol_type = other RNA
ttttttttttaacttgacc

SEQ ID NO: 11458 - RNA, 19 nt, synthetic construct
  source 1..19: mol_type = other RNA
tttttttttttaacttgac

SEQ ID NO: 11459 - RNA, 19 nt, synthetic construct
  source 1..19: mol_type = other RNA
ttttttttttttaacttga

SEQ ID NO: 11460 - RNA, 19 nt, synthetic construct
  source 1..19: mol_type = other RNA
gttttttttttttaacttg

SEQ ID NO: 11461 - RNA, 19 nt, synthetic construct
  source 1..19: mol_type = other RNA
tgttttttttttttaactt

SEQ ID NO: 11462 - RNA, 19 nt, synthetic construct
  source 1..19: mol_type = other RNA
ttgttttttttttttaact

SEQ ID NO: 11463 - RNA, 19 nt, synthetic construct
  source 1..19: mol_type = other RNA
attgttttttttttttaac

SEQ ID NO: 11464 - RNA, 19 nt, synthetic construct
  source 1..19: mol_type = other RNA
tattgttttttttttttaa

SEQ ID NO: 11465 - RNA, 19 nt, synthetic construct
  source 1..19: mol_type = other RNA
atattgtttttttttttta

SEQ ID NO: 11466 - RNA, 19 nt, synthetic construct
  source 1..19: mol_type = other RNA
aatattgtttttttttttt

SEQ ID NO: 11467 - RNA, 19 nt, synthetic construct
  source 1..19: mol_type = other RNA
taatattgttttttttttt

SEQ ID NO: 11468 - RNA, 19 nt, synthetic construct
  source 1..19: mol_type = other RNA
ttaatattgtttttttttt

SEQ ID NO: 11469 - RNA, 19 nt, synthetic construct
  source 1..19: mol_type = other RNA
tttaatattgttttttttt

SEQ ID NO: 11470 - RNA, 19 nt, synthetic construct
  source 1..19: mol_type = other RNA
gtttaatattgtttttttt

SEQ ID NO: 11471 - RNA, 19 nt, synthetic construct
  source 1..19: mol_type = other RNA
tgtttaatattgttttttt

SEQ ID NO: 11472 - RNA, 19 nt, synthetic construct
  source 1..19: mol_type = other RNA
ttgtttaatattgtttttt

SEQ ID NO: 11473 - RNA, 19 nt, synthetic construct
  source 1..19: mol_type = other RNA
gttgtttaatattgttttt

SEQ ID NO: 11474 - RNA, 19 nt, synthetic construct
  source 1..19: mol_type = other RNA
tgttgtttaatattgtttt

SEQ ID NO: 11475 - RNA, 19 nt, synthetic construct
  source 1..19: mol_type = other RNA
atgttgtttaatattgttt

SEQ ID NO: 11476 - RNA, 19 nt, synthetic construct
  source 1..19: mol_type = other RNA
catgttgtttaatattgtt

SEQ ID NO: 11477 - RNA, 19 nt, synthetic construct
  source 1..19: mol_type = other RNA
tcatgttgtttaatattgt

SEQ ID NO: 11478 - RNA, 19 nt, synthetic construct
  source 1..19: mol_type = other RNA
ttcatgttgtttaatattg

SEQ ID NO: 11479 - RNA, 19 nt, synthetic construct
  source 1..19: mol_type = other RNA
tttcatgttgtttaatatt

SEQ ID NO: 11480 - RNA, 19 nt, synthetic construct
  source 1..19: mol_type = other RNA
gtttcatgttgtttaatat

SEQ ID NO: 11481 - RNA, 19 nt, synthetic construct
  source 1..19: mol_type = other RNA
agtttcatgttgtttaata

SEQ ID NO: 11482 - RNA, 19 nt, synthetic construct
  source 1..19: mol_type = other RNA
cagtttcatgttgtttaat

SEQ ID NO: 11483 - RNA, 19 nt, synthetic construct
  source 1..19: mol_type = other RNA
gcagtttcatgttgtttaa

SEQ ID NO: 11484 - RNA, 19 nt, synthetic construct
  source 1..19: mol_type = other RNA
tgcagtttcatgttgttta

SEQ ID NO: 11485 - RNA, 19 nt, synthetic construct
  source 1..19: mol_type = other RNA
ctgcagtttcatgttgttt

SEQ ID NO: 11486 - RNA, 19 nt, synthetic construct
  source 1..19: mol_type = other RNA
actgcagtttcatgttgtt

SEQ ID NO: 11487 - RNA, 19 nt, synthetic construct
  source 1..19: mol_type = other RNA
gactgcagtttcatgttgt

SEQ ID NO: 11488 - RNA, 19 nt, synthetic construct
  source 1..19: mol_type = other RNA
agactgcagtttcatgttg

SEQ ID NO: 11489 - RNA, 19 nt, synthetic construct
  source 1..19: mol_type = other RNA
cagactgcagtttcatgtt

SEQ ID NO: 11490 - RNA, 19 nt, synthetic construct
  source 1..19: mol_type = other RNA
acagactgcagtttcatgt

SEQ ID NO: 11491 - RNA, 19 nt, synthetic construct
  source 1..19: mol_type = other RNA
aacagactgcagtttcatg

SEQ ID NO: 11492 - RNA, 19 nt, synthetic construct
  source 1..19: mol_type = other RNA
aaacagactgcagtttcat

SEQ ID NO: 11493 - RNA, 19 nt, synthetic construct
  source 1..19: mol_type = other RNA
aaaacagactgcagtttca

SEQ ID NO: 11494 - RNA, 19 nt, synthetic construct
  source 1..19: mol_type = other RNA
aaaaacagactgcagtttc

SEQ ID NO: 11495 - RNA, 19 nt, synthetic construct
  source 1..19: mol_type = other RNA
caaaaacagactgcagttt

SEQ ID NO: 11496 - RNA, 19 nt, synthetic construct
  source 1..19: mol_type = other RNA
tcaaaaacagactgcagtt

SEQ ID NO: 11497 - RNA, 19 nt, synthetic construct
  source 1..19: mol_type = other RNA
ttcaaaaacagactgcagt

SEQ ID NO: 11498 - RNA, 19 nt, synthetic construct
  source 1..19: mol_type = other RNA
tttcaaaaacagactgcag

SEQ ID NO: 11499 - RNA, 19 nt, synthetic construct
  source 1..19: mol_type = other RNA
ttttcaaaaacagactgca

SEQ ID NO: 11500 - RNA, 19 nt, synthetic construct
  source 1..19: mol_type = other RNA
attttcaaaaacagactgc

SEQ ID NO: 11501 - RNA, 19 nt, synthetic construct
  source 1..19: mol_type = other RNA
cattttcaaaaacagactg

SEQ ID NO: 11502 - RNA, 19 nt, synthetic construct
  source 1..19: mol_type = other RNA
tcattttcaaaaacagact

SEQ ID NO: 11503 - RNA, 19 nt, synthetic construct
  source 1..19: mol_type = other RNA
ctcattttcaaaaacagac

SEQ ID NO: 11504 - RNA, 19 nt, synthetic construct
  source 1..19: mol_type = other RNA
tctcattttcaaaaacaga

SEQ ID NO: 11505 - RNA, 19 nt, synthetic construct
  source 1..19: mol_type = other RNA
ttctcattttcaaaaacag

SEQ ID NO: 11506 - RNA, 19 nt, synthetic construct
  source 1..19: mol_type = other RNA
attctcattttcaaaaaca

SEQ ID NO: 11507 - RNA, 19 nt, synthetic construct
  source 1..19: mol_type = other RNA
cattctcattttcaaaaac

SEQ ID NO: 11508 - RNA, 19 nt, synthetic construct
  source 1..19: mol_type = other RNA
acattctcattttcaaaaa

SEQ ID NO: 11509 - RNA, 19 nt, synthetic construct
  source 1..19: mol_type = other RNA
gacattctcattttcaaaa

SEQ ID NO: 11510 - RNA, 19 nt, synthetic construct
  source 1..19: mol_type = other RNA
ggacattctcattttcaaa

SEQ ID NO: 11511 - RNA, 19 nt, synthetic construct
  source 1..19: mol_type = other RNA
aggacattctcattttcaa

SEQ ID NO: 11512 - RNA, 19 nt, synthetic construct
  source 1..19: mol_type = other RNA
taggacattctcattttca

SEQ ID NO: 11513 - RNA, 19 nt, synthetic construct
  source 1..19: mol_type = other RNA
ttaggacattctcattttc

SEQ ID NO: 11514 - RNA, 19 nt, synthetic construct
  source 1..19: mol_type = other RNA
cttaggacattctcatttt

SEQ ID NO: 11515 - RNA, 19 nt, synthetic construct
  source 1..19: mol_type = other RNA
acttaggacattctcattt

SEQ ID NO: 11516 - RNA, 19 nt, synthetic construct
  source 1..19: mol_type = other RNA
cacttaggacattctcatt

SEQ ID NO: 11517 - RNA, 19 nt, synthetic construct
  source 1..19: mol_type = other RNA
tcacttaggacattctcat

SEQ ID NO: 11518 - RNA, 19 nt, synthetic construct
  source 1..19: mol_type = other RNA
atcacttaggacattctca

SEQ ID NO: 11519 - RNA, 19 nt, synthetic construct
  source 1..19: mol_type = other RNA
aatcacttaggacattctc

SEQ ID NO: 11520 - RNA, 19 nt, synthetic construct
  source 1..19: mol_type = other RNA
gaatcacttaggacattct

SEQ ID NO: 11521 - RNA, 19 nt, synthetic construct
  source 1..19: mol_type = other RNA
tgaatcacttaggacattc

SEQ ID NO: 11522 - RNA, 19 nt, synthetic construct
  source 1..19: mol_type = other RNA
ctgaatcacttaggacatt

SEQ ID NO: 11523 - RNA, 19 nt, synthetic construct
  source 1..19: mol_type = other RNA
tctgaatcacttaggacat

SEQ ID NO: 11524 - RNA, 19 nt, synthetic construct
  source 1..19: mol_type = other RNA
ttctgaatcacttaggaca

SEQ ID NO: 11525 - RNA, 19 nt, synthetic construct
  source 1..19: mol_type = other RNA
cttctgaatcacttaggac

SEQ ID NO: 11526 - RNA, 19 nt, synthetic construct
  source 1..19: mol_type = other RNA
tcttctgaatcacttagga

SEQ ID NO: 11527 - RNA, 19 nt, synthetic construct
  source 1..19: mol_type = other RNA
ctcttctgaatcacttagg

SEQ ID NO: 11528 - RNA, 19 nt, synthetic construct
  source 1..19: mol_type = other RNA
tctcttctgaatcacttag

SEQ ID NO: 11529 - RNA, 19 nt, synthetic construct
  source 1..19: mol_type = other RNA
ctctcttctgaatcactta

SEQ ID NO: 11530 - RNA, 19 nt, synthetic construct
  source 1..19: mol_type = other RNA
cctctcttctgaatcactt

SEQ ID NO: 11531 - RNA, 19 nt, synthetic construct
  source 1..19: mol_type = other RNA
tcctctcttctgaatcact

SEQ ID NO: 11532 - RNA, 19 nt, synthetic construct
  source 1..19: mol_type = other RNA
ctcctctcttctgaatcac

SEQ ID NO: 11533 - RNA, 19 nt, synthetic construct
  source 1..19: mol_type = other RNA
cctcctctcttctgaatca

SEQ ID NO: 11534 - RNA, 19 nt, synthetic construct
  source 1..19: mol_type = other RNA
ccctcctctcttctgaatc

SEQ ID NO: 11535 - RNA, 19 nt, synthetic construct
  source 1..19: mol_type = other RNA
tccctcctctcttctgaat

SEQ ID NO: 11536 - RNA, 19 nt, synthetic construct
  source 1..19: mol_type = other RNA
ttccctcctctcttctgaa

SEQ ID NO: 11537 - RNA, 19 nt, synthetic construct
  source 1..19: mol_type = other RNA
cttccctcctctcttctga

SEQ ID NO: 11538 - RNA, 19 nt, synthetic construct
  source 1..19: mol_type = other RNA
acttccctcctctcttctg

SEQ ID NO: 11539 - RNA, 19 nt, synthetic construct
  source 1..19: mol_type = other RNA
aacttccctcctctcttct

SEQ ID NO: 11540 - RNA, 19 nt, synthetic construct
  source 1..19: mol_type = other RNA
caacttccctcctctcttc

SEQ ID NO: 11541 - RNA, 19 nt, synthetic construct
  source 1..19: mol_type = other RNA
acaacttccctcctctctt

SEQ ID NO: 11542 - RNA, 19 nt, synthetic construct
  source 1..19: mol_type = other RNA
cacaacttccctcctctct

SEQ ID NO: 11543 - RNA, 19 nt, synthetic construct
  source 1..19: mol_type = other RNA
gcacaacttccctcctctc

SEQ ID NO: 11544 - RNA, 19 nt, synthetic construct
  source 1..19: mol_type = other RNA
tgcacaacttccctcctct

SEQ ID NO: 11545 - RNA, 19 nt, synthetic construct
  source 1..19: mol_type = other RNA
gtgcacaacttccctcctc

SEQ ID NO: 11546 - RNA, 19 nt, synthetic construct
  source 1..19: mol_type = other RNA
agtgcacaacttccctcct

SEQ ID NO: 11547 - RNA, 19 nt, synthetic construct
  source 1..19: mol_type = other RNA
gagtgcacaacttccctcc

SEQ ID NO: 11548 - RNA, 19 nt, synthetic construct
  source 1..19: mol_type = other RNA
agagtgcacaacttccctc

SEQ ID NO: 11549 - RNA, 19 nt, synthetic construct
  source 1..19: mol_type = other RNA
cagagtgcacaacttccct

SEQ ID NO: 11550 - RNA, 19 nt, synthetic construct
  source 1..19: mol_type = other RNA
tcagagtgcacaacttccc

SEQ ID NO: 11551 - RNA, 19 nt, synthetic construct
  source 1..19: mol_type = other RNA
ttcagagtgcacaacttcc

SEQ ID NO: 11552 - RNA, 19 nt, synthetic construct
  source 1..19: mol_type = other RNA
tttcagagtgcacaacttc

SEQ ID NO: 11553 - RNA, 19 nt, synthetic construct
  source 1..19: mol_type = other RNA
ttttcagagtgcacaactt

SEQ ID NO: 11554 - RNA, 19 nt, synthetic construct
  source 1..19: mol_type = other RNA
attttcagagtgcacaact

SEQ ID NO: 11555 - RNA, 19 nt, synthetic construct
  source 1..19: mol_type = other RNA
cattttcagagtgcacaac

SEQ ID NO: 11556 - RNA, 19 nt, synthetic construct
  source 1..19: mol_type = other RNA
gcattttcagagtgcacaa

SEQ ID NO: 11557 - RNA, 19 nt, synthetic construct
  source 1..19: mol_type = other RNA
tgcattttcagagtgcaca

SEQ ID NO: 11558 - RNA, 19 nt, synthetic construct
  source 1..19: mol_type = other RNA
atgcattttcagagtgcac

SEQ ID NO: 11559 - RNA, 19 nt, synthetic construct
  source 1..19: mol_type = other RNA
catgcattttcagagtgca

SEQ ID NO: 11560 - RNA, 19 nt, synthetic construct
  source 1..19: mol_type = other RNA
tcatgcattttcagagtgc

SEQ ID NO: 11561 - RNA, 19 nt, synthetic construct
  source 1..19: mol_type = other RNA
ttcatgcattttcagagtg

SEQ ID NO: 11562 - RNA, 19 nt, synthetic construct
  source 1..19: mol_type = other RNA
tttcatgcattttcagagt

SEQ ID NO: 11563 - RNA, 19 nt, synthetic construct
  source 1..19: mol_type = other RNA
ttttcatgcattttcagag

SEQ ID NO: 11564 - RNA, 19 nt, synthetic construct
  source 1..19: mol_type = other RNA
tttttcatgcattttcaga

SEQ ID NO: 11565 - RNA, 19 nt, synthetic construct
  source 1..19: mol_type = other RNA
gtttttcatgcattttcag

SEQ ID NO: 11566 - RNA, 19 nt, synthetic construct
  source 1..19: mol_type = other RNA
tgtttttcatgcattttca

SEQ ID NO: 11567 - RNA, 19 nt, synthetic construct
  source 1..19: mol_type = other RNA
ttgtttttcatgcattttc

SEQ ID NO: 11568 - RNA, 19 nt, synthetic construct
  source 1..19: mol_type = other RNA
tttgtttttcatgcatttt

SEQ ID NO: 11569 - RNA, 19 nt, synthetic construct
  source 1..19: mol_type = other RNA
ctttgtttttcatgcattt

SEQ ID NO: 11570 - RNA, 19 nt, synthetic construct
  source 1..19: mol_type = other RNA
cctttgtttttcatgcatt

SEQ ID NO: 11571 - RNA, 19 nt, synthetic construct
  source 1..19: mol_type = other RNA
gcctttgtttttcatgcat

SEQ ID NO: 11572 - RNA, 19 nt, synthetic construct
  source 1..19: mol_type = other RNA
tgcctttgtttttcatgca

SEQ ID NO: 11573 - RNA, 19 nt, synthetic construct
  source 1..19: mol_type = other RNA
ttgcctttgtttttcatgc

SEQ ID NO: 11574 - RNA, 19 nt, synthetic construct
  source 1..19: mol_type = other RNA
tttgcctttgtttttcatg

SEQ ID NO: 11575 - RNA, 19 nt, synthetic construct
  source 1..19: mol_type = other RNA
ttttgcctttgtttttcat

SEQ ID NO: 11576 - RNA, 19 nt, synthetic construct
  source 1..19: mol_type = other RNA
tttttgcctttgtttttca

SEQ ID NO: 11577 - RNA, 19 nt, synthetic construct
  source 1..19: mol_type = other RNA
gtttttgcctttgtttttc

SEQ ID NO: 11578 - RNA, 19 nt, synthetic construct
  source 1..19: mol_type = other RNA
agtttttgcctttgttttt

SEQ ID NO: 11579 - RNA, 19 nt, synthetic construct
  source 1..19: mol_type = other RNA
tagtttttgcctttgtttt

SEQ ID NO: 11580 - RNA, 19 nt, synthetic construct
  source 1..19: mol_type = other RNA
ctagtttttgcctttgttt

SEQ ID NO: 11581 - RNA, 19 nt, synthetic construct
  source 1..19: mol_type = other RNA
actagtttttgcctttgtt

SEQ ID NO: 11582 - RNA, 19 nt, synthetic construct
  source 1..19: mol_type = other RNA
cactagtttttgcctttgt

SEQ ID NO: 11583 - RNA, 19 nt, synthetic construct
  source 1..19: mol_type = other RNA
ccactagtttttgcctttg

SEQ ID NO: 11584 - RNA, 19 nt, synthetic construct
  source 1..19: mol_type = other RNA
cccactagtttttgccttt

SEQ ID NO: 11585 - RNA, 19 nt, synthetic construct
  source 1..19: mol_type = other RNA
tcccactagtttttgcctt

SEQ ID NO: 11586 - RNA, 19 nt, synthetic construct
  source 1..19: mol_type = other RNA
ttcccactagtttttgcct

SEQ ID NO: 11587 - RNA, 19 nt, synthetic construct
  source 1..19: mol_type = other RNA
tttcccactagtttttgcc

SEQ ID NO: 11588 - RNA, 19 nt, synthetic construct
  source 1..19: mol_type = other RNA
atttcccactagtttttgc

SEQ ID NO: 11589 - RNA, 19 nt, synthetic construct
  source 1..19: mol_type = other RNA
catttcccactagtttttg

SEQ ID NO: 11590 - RNA, 19 nt, synthetic construct
  source 1..19: mol_type = other RNA
acatttcccactagttttt

SEQ ID NO: 11591 - RNA, 19 nt, synthetic construct
  source 1..19: mol_type = other RNA
cacatttcccactagtttt

SEQ ID NO: 11592 - RNA, 19 nt, synthetic construct
  source 1..19: mol_type = other RNA
acacatttcccactagttt

SEQ ID NO: 11593 - RNA, 19 nt, synthetic construct
  source 1..19: mol_type = other RNA
tacacatttcccactagtt

SEQ ID NO: 11594 - RNA, 19 nt, synthetic construct
  source 1..19: mol_type = other RNA
ctacacatttcccactagt

SEQ ID NO: 11595 - RNA, 19 nt, synthetic construct
  source 1..19: mol_type = other RNA
tctacacatttcccactag

SEQ ID NO: 11596 - RNA, 19 nt, synthetic construct
  source 1..19: mol_type = other RNA
ttctacacatttcccacta

SEQ ID NO: 11597 - RNA, 19 nt, synthetic construct
  source 1..19: mol_type = other RNA
gttctacacatttcccact

SEQ ID NO: 11598 - RNA, 19 nt, synthetic construct
  source 1..19: mol_type = other RNA
agttctacacatttcccac

SEQ ID NO: 11599 - RNA, 19 nt, synthetic construct
  source 1..19: mol_type = other RNA
cagttctacacatttccca

SEQ ID NO: 11600 - RNA, 19 nt, synthetic construct
  source 1..19: mol_type = other RNA
acagttctacacatttccc

SEQ ID NO: 11601 - RNA, 19 nt, synthetic construct
  source 1..19: mol_type = other RNA
aacagttctacacatttcc

SEQ ID NO: 11602 - RNA, 19 nt, synthetic construct
  source 1..19: mol_type = other RNA
taacagttctacacatttc

SEQ ID NO: 11603 - RNA, 19 nt, synthetic construct
  source 1..19: mol_type = other RNA
ttaacagttctacacattt

SEQ ID NO: 11604 - RNA, 19 nt, synthetic construct
  source 1..19: mol_type = other RNA
gttaacagttctacacatt

SEQ ID NO: 11605 - RNA, 19 nt, synthetic construct
  source 1..19: mol_type = other RNA
agttaacagttctacacat

SEQ ID NO: 11606 - RNA, 19 nt, synthetic construct
  source 1..19: mol_type = other RNA
cagttaacagttctacaca

SEQ ID NO: 11607 - RNA, 19 nt, synthetic construct
  source 1..19: mol_type = other RNA
tcagttaacagttctacac

SEQ ID NO: 11608 - RNA, 19 nt, synthetic construct
  source 1..19: mol_type = other RNA
ctcagttaacagttctaca

SEQ ID NO: 11609 - RNA, 19 nt, synthetic construct
  source 1..19: mol_type = other RNA
tctcagttaacagttctac

SEQ ID NO: 11610 - RNA, 19 nt, synthetic construct
  source 1..19: mol_type = other RNA
atctcagttaacagttcta

SEQ ID NO: 11611 - RNA, 19 nt, synthetic construct
  source 1..19: mol_type = other RNA
catctcagttaacagttct

SEQ ID NO: 11612 - RNA, 19 nt, synthetic construct
  source 1..19: mol_type = other RNA
ccatctcagttaacagttc

SEQ ID NO: 11613 - RNA, 19 nt, synthetic construct
  source 1..19: mol_type = other RNA
gccatctcagttaacagtt

SEQ ID NO: 11614 - RNA, 19 nt, synthetic construct
  source 1..19: mol_type = other RNA
agccatctcagttaacagt

SEQ ID NO: 11615 - RNA, 19 nt, synthetic construct
  source 1..19: mol_type = other RNA
aagccatctcagttaacag

SEQ ID NO: 11616 - RNA, 19 nt, synthetic construct
  source 1..19: mol_type = other RNA
gaagccatctcagttaaca

SEQ ID NO: 11617 - RNA, 19 nt, synthetic construct
  source 1..19: mol_type = other RNA
cgaagccatctcagttaac

SEQ ID NO: 11618 - RNA, 19 nt, synthetic construct
  source 1..19: mol_type = other RNA
tcgaagccatctcagttaa

SEQ ID NO: 11619 - RNA, 19 nt, synthetic construct
  source 1..19: mol_type = other RNA
ctcgaagccatctcagtta

SEQ ID NO: 11620 - RNA, 19 nt, synthetic construct
  source 1..19: mol_type = other RNA
actcgaagccatctcagtt

SEQ ID NO: 11621 - RNA, 19 nt, synthetic construct
  source 1..19: mol_type = other RNA
gactcgaagccatctcagt

SEQ ID NO: 11622 - RNA, 19 nt, synthetic construct
  source 1..19: mol_type = other RNA
agactcgaagccatctcag

SEQ ID NO: 11623 - RNA, 19 nt, synthetic construct
  source 1..19: mol_type = other RNA
aagactcgaagccatctca

SEQ ID NO: 11624 - RNA, 19 nt, synthetic construct
  source 1..19: mol_type = other RNA
gaagactcgaagccatctc

SEQ ID NO: 11625 - RNA, 19 nt, synthetic construct
  source 1..19: mol_type = other RNA
ggaagactcgaagccatct

SEQ ID NO: 11626 - RNA, 19 nt, synthetic construct
  source 1..19: mol_type = other RNA
aggaagactcgaagccatc

SEQ ID NO: 11627 - RNA, 19 nt, synthetic construct
  source 1..19: mol_type = other RNA
aaggaagactcgaagccat

SEQ ID NO: 11628 - RNA, 19 nt, synthetic construct
  source 1..19: mol_type = other RNA
gaaggaagactcgaagcca

SEQ ID NO: 11629 - RNA, 19 nt, synthetic construct
  source 1..19: mol_type = other RNA
agaaggaagactcgaagcc

SEQ ID NO: 11630 - RNA, 19 nt, synthetic construct
  source 1..19: mol_type = other RNA
cagaaggaagactcgaagc

SEQ ID NO: 11631 - RNA, 19 nt, synthetic construct
  source 1..19: mol_type = other RNA
ccagaaggaagactcgaag

SEQ ID NO: 11632 - RNA, 19 nt, synthetic construct
  source 1..19: mol_type = other RNA
tccagaaggaagactcgaa

SEQ ID NO: 11633 - RNA, 19 nt, synthetic construct
  source 1..19: mol_type = other RNA
ttccagaaggaagactcga

SEQ ID NO: 11634 - RNA, 19 nt, synthetic construct
  source 1..19: mol_type = other RNA
attccagaaggaagactcg

SEQ ID NO: 11635 - RNA, 19 nt, synthetic construct
  source 1..19: mol_type = other RNA
gattccagaaggaagactc

SEQ ID NO: 11636 - RNA, 19 nt, synthetic construct
  source 1..19: mol_type = other RNA
agattccagaaggaagact

SEQ ID NO: 11637 - RNA, 19 nt, synthetic construct
  source 1..19: mol_type = other RNA
cagattccagaaggaagac

SEQ ID NO: 11638 - RNA, 19 nt, synthetic construct
  source 1..19: mol_type = other RNA
acagattccagaaggaaga

SEQ ID NO: 11639 - RNA, 19 nt, synthetic construct
  source 1..19: mol_type = other RNA
aacagattccagaaggaag

SEQ ID NO: 11640 - RNA, 19 nt, synthetic construct
  source 1..19: mol_type = other RNA
taacagattccagaaggaa

SEQ ID NO: 11641 - RNA, 19 nt, synthetic construct
  source 1..19: mol_type = other RNA
ttaacagattccagaagga

SEQ ID NO: 11642 - RNA, 19 nt, synthetic construct
  source 1..19: mol_type = other RNA
tttaacagattccagaagg

SEQ ID NO: 11643 - RNA, 19 nt, synthetic construct
  source 1..19: mol_type = other RNA
atttaacagattccagaag

SEQ ID NO: 11644 - RNA, 19 nt, synthetic construct
  source 1..19: mol_type = other RNA
aatttaacagattccagaa

SEQ ID NO: 11645 - RNA, 19 nt, synthetic construct
  source 1..19: mol_type = other RNA
aaatttaacagattccaga

SEQ ID NO: 11646 - RNA, 19 nt, synthetic construct
  source 1..19: mol_type = other RNA
gaaatttaacagattccag

SEQ ID NO: 11647 - RNA, 19 nt, synthetic construct
  source 1..19: mol_type = other RNA
tgaaatttaacagattcca

SEQ ID NO: 11648 - RNA, 19 nt, synthetic construct
  source 1..19: mol_type = other RNA
gtgaaatttaacagattcc

SEQ ID NO: 11649 - RNA, 19 nt, synthetic construct
  source 1..19: mol_type = other RNA
tgtgaaatttaacagattc

SEQ ID NO: 11650 - RNA, 19 nt, synthetic construct
  source 1..19: mol_type = other RNA
ttgtgaaatttaacagatt

SEQ ID NO: 11651 - RNA, 19 nt, synthetic construct
  source 1..19: mol_type = other RNA
tttgtgaaatttaacagat

SEQ ID NO: 11652 - RNA, 19 nt, synthetic construct
  source 1..19: mol_type = other RNA
ctttgtgaaatttaacaga

SEQ ID NO: 11653 - RNA, 19 nt, synthetic construct
  source 1..19: mol_type = other RNA
actttgtgaaatttaacag

SEQ ID NO: 11654 - RNA, 19 nt, synthetic construct
  source 1..19: mol_type = other RNA
gactttgtgaaatttaaca

SEQ ID NO: 11655 - RNA, 19 nt, synthetic construct
  source 1..19: mol_type = other RNA
tgactttgtgaaatttaac

SEQ ID NO: 11656 - RNA, 19 nt, synthetic construct
  source 1..19: mol_type = other RNA
atgactttgtgaaatttaa

SEQ ID NO: 11657 - RNA, 19 nt, synthetic construct
  source 1..19: mol_type = other RNA
catgactttgtgaaattta

SEQ ID NO: 11658 - RNA, 19 nt, synthetic construct
  source 1..19: mol_type = other RNA
tcatgactttgtgaaattt

SEQ ID NO: 11659 - RNA, 19 nt, synthetic construct
  source 1..19: mol_type = other RNA
ctcatgactttgtgaaatt

SEQ ID NO: 11660 - RNA, 19 nt, synthetic construct
  source 1..19: mol_type = other RNA
cctcatgactttgtgaaat

SEQ ID NO: 11661 - RNA, 19 nt, synthetic construct
  source 1..19: mol_type = other RNA
ccctcatgactttgtgaaa

SEQ ID NO: 11662 - RNA, 19 nt, synthetic construct
  source 1..19: mol_type = other RNA
accctcatgactttgtgaa

SEQ ID NO: 11663 - RNA, 19 nt, synthetic construct
  source 1..19: mol_type = other RNA
taccctcatgactttgtga

SEQ ID NO: 11664 - RNA, 19 nt, synthetic construct
  source 1..19: mol_type = other RNA
ttaccctcatgactttgtg

SEQ ID NO: 11665 - RNA, 19 nt, synthetic construct
  source 1..19: mol_type = other RNA
tttaccctcatgactttgt

SEQ ID NO: 11666 - RNA, 19 nt, synthetic construct
  source 1..19: mol_type = other RNA
atttaccctcatgactttg

SEQ ID NO: 11667 - RNA, 19 nt, synthetic construct
  source 1..19: mol_type = other RNA
catttaccctcatgacttt

SEQ ID NO: 11668 - RNA, 19 nt, synthetic construct
  source 1..19: mol_type = other RNA
ccatttaccctcatgactt

SEQ ID NO: 11669 - RNA, 19 nt, synthetic construct
  source 1..19: mol_type = other RNA
tccatttaccctcatgact

SEQ ID NO: 11670 - RNA, 19 nt, synthetic construct
  source 1..19: mol_type = other RNA
ctccatttaccctcatgac

SEQ ID NO: 11671 - RNA, 19 nt, synthetic construct
  source 1..19: mol_type = other RNA
tctccatttaccctcatga

SEQ ID NO: 11672 - RNA, 19 nt, synthetic construct
  source 1..19: mol_type = other RNA
ttctccatttaccctcatg

SEQ ID NO: 11673 - RNA, 19 nt, synthetic construct
  source 1..19: mol_type = other RNA
tttctccatttaccctcat

SEQ ID NO: 11674 - RNA, 19 nt, synthetic construct
  source 1..19: mol_type = other RNA
ttttctccatttaccctca

SEQ ID NO: 11675 - RNA, 19 nt, synthetic construct
  source 1..19: mol_type = other RNA
attttctccatttaccctc

SEQ ID NO: 11676 - RNA, 19 nt, synthetic construct
  source 1..19: mol_type = other RNA
tattttctccatttaccct

SEQ ID NO: 11677 - RNA, 19 nt, synthetic construct
  source 1..19: mol_type = other RNA
atattttctccatttaccc

SEQ ID NO: 11678 - RNA, 19 nt, synthetic construct
  source 1..19: mol_type = other RNA
aatattttctccatttacc

SEQ ID NO: 11679 - RNA, 19 nt, synthetic construct
  source 1..19: mol_type = other RNA
aaatattttctccatttac

SEQ ID NO: 11680 - RNA, 19 nt, synthetic construct
  source 1..19: mol_type = other RNA
gaaatattttctccattta

SEQ ID NO: 11681 - RNA, 19 nt, synthetic construct
  source 1..19: mol_type = other RNA
agaaatattttctccattt

SEQ ID NO: 11682 - RNA, 19 nt, synthetic construct
  source 1..19: mol_type = other RNA
cagaaatattttctccatt

SEQ ID NO: 11683 - RNA, 19 nt, synthetic construct
  source 1..19: mol_type = other RNA
ccagaaatattttctccat

SEQ ID NO: 11684 - RNA, 19 nt, synthetic construct
  source 1..19: mol_type = other RNA
cccagaaatattttctcca

SEQ ID NO: 11685 - RNA, 19 nt, synthetic construct
  source 1..19: mol_type = other RNA
tcccagaaatattttctcc

SEQ ID NO: 11686 - RNA, 19 nt, synthetic construct
  source 1..19: mol_type = other RNA
atcccagaaatattttctc

SEQ ID NO: 11687 - RNA, 19 nt, synthetic construct
  source 1..19: mol_type = other RNA
aatcccagaaatattttct

SEQ ID NO: 11688 - RNA, 19 nt, synthetic construct
  source 1..19: mol_type = other RNA
taatcccagaaatattttc

SEQ ID NO: 11689 - RNA, 19 nt, synthetic construct
  source 1..19: mol_type = other RNA
gtaatcccagaaatatttt

SEQ ID NO: 11690 - RNA, 19 nt, synthetic construct
  source 1..19: mol_type = other RNA
tgtaatcccagaaatattt

SEQ ID NO: 11691 - RNA, 19 nt, synthetic construct
  source 1..19: mol_type = other RNA
ttgtaatcccagaaatatt

SEQ ID NO: 11692 - RNA, 19 nt, synthetic construct
  source 1..19: mol_type = other RNA
attgtaatcccagaaatat

SEQ ID NO: 11693 - RNA, 19 nt, synthetic construct
  source 1..19: mol_type = other RNA
cattgtaatcccagaaata

SEQ ID NO: 11694 - RNA, 19 nt, synthetic construct
  source 1..19: mol_type = other RNA
tcattgtaatcccagaaat

SEQ ID NO: 11695 - RNA, 19 nt, synthetic construct
  source 1..19: mol_type = other RNA
ttcattgtaatcccagaaa

SEQ ID NO: 11696 - RNA, 19 nt, synthetic construct
  source 1..19: mol_type = other RNA
attcattgtaatcccagaa

SEQ ID NO: 11697 - RNA, 19 nt, synthetic construct
  source 1..19: mol_type = other RNA
cattcattgtaatcccaga

SEQ ID NO: 11698 - RNA, 19 nt, synthetic construct
  source 1..19: mol_type = other RNA
acattcattgtaatcccag

SEQ ID NO: 11699 - RNA, 19 nt, synthetic construct
  source 1..19: mol_type = other RNA
tacattcattgtaatccca

SEQ ID NO: 11700 - RNA, 19 nt, synthetic construct
  source 1..19: mol_type = other RNA
ttacattcattgtaatccc

SEQ ID NO: 11701 - RNA, 19 nt, synthetic construct
  source 1..19: mol_type = other RNA
cttacattcattgtaatcc

SEQ ID NO: 11702 - RNA, 19 nt, synthetic construct
  source 1..19: mol_type = other RNA
gcttacattcattgtaatc

SEQ ID NO: 11703 - RNA, 19 nt, synthetic construct
  source 1..19: mol_type = other RNA
ggcttacattcattgtaat

SEQ ID NO: 11704 - RNA, 19 nt, synthetic construct
  source 1..19: mol_type = other RNA
gggcttacattcattgtaa

SEQ ID NO: 11705 - RNA, 19 nt, synthetic construct
  source 1..19: mol_type = other RNA
tgggcttacattcattgta

SEQ ID NO: 11706 - RNA, 19 nt, synthetic construct
  source 1..19: mol_type = other RNA
ttgggcttacattcattgt

SEQ ID NO: 11707 - RNA, 19 nt, synthetic construct
  source 1..19: mol_type = other RNA
tttgggcttacattcattg

SEQ ID NO: 11708 - RNA, 19 nt, synthetic construct
  source 1..19: mol_type = other RNA
atttgggcttacattcatt

SEQ ID NO: 11709 - RNA, 19 nt, synthetic construct
  source 1..19: mol_type = other RNA
aatttgggcttacattcat

SEQ ID NO: 11710 - RNA, 19 nt, synthetic construct
  source 1..19: mol_type = other RNA
caatttgggcttacattca

SEQ ID NO: 11711 - RNA, 19 nt, synthetic construct
  source 1..19: mol_type = other RNA
acaatttgggcttacattc

SEQ ID NO: 11712 - RNA, 19 nt, synthetic construct
  source 1..19: mol_type = other RNA
cacaatttgggcttacatt

SEQ ID NO: 11713 - RNA, 19 nt, synthetic construct
  source 1..19: mol_type = other RNA
ccacaatttgggcttacat

SEQ ID NO: 11714 - RNA, 19 nt, synthetic construct
  source 1..19: mol_type = other RNA
tccacaatttgggcttaca

SEQ ID NO: 11715 - RNA, 19 nt, synthetic construct
  source 1..19: mol_type = other RNA
ttccacaatttgggcttac

SEQ ID NO: 11716 - RNA, 19 nt, synthetic construct
  source 1..19: mol_type = other RNA
attccacaatttgggctta

SEQ ID NO: 11717 - RNA, 19 nt, synthetic construct
  source 1..19: mol_type = other RNA
aattccacaatttgggctt

SEQ ID NO: 11718 - RNA, 19 nt, synthetic construct
  source 1..19: mol_type = other RNA
caattccacaatttgggct

SEQ ID NO: 11719 - RNA, 19 nt, synthetic construct
  source 1..19: mol_type = other RNA
gcaattccacaatttgggc

SEQ ID NO: 11720 - RNA, 19 nt, synthetic construct
  source 1..19: mol_type = other RNA
ggcaattccacaatttggg

SEQ ID NO: 11721 - RNA, 19 nt, synthetic construct
  source 1..19: mol_type = other RNA
tggcaattccacaatttgg

SEQ ID NO: 11722 - RNA, 19 nt, synthetic construct
  source 1..19: mol_type = other RNA
ctggcaattccacaatttg

SEQ ID NO: 11723 - RNA, 19 nt, synthetic construct
  source 1..19: mol_type = other RNA
actggcaattccacaattt

SEQ ID NO: 11724 - RNA, 19 nt, synthetic construct
  source 1..19: mol_type = other RNA
tactggcaattccacaatt

SEQ ID NO: 11725 - RNA, 19 nt, synthetic construct
  source 1..19: mol_type = other RNA
ttactggcaattccacaat

SEQ ID NO: 11726 - RNA, 19 nt, synthetic construct
  source 1..19: mol_type = other RNA
gttactggcaattccacaa

SEQ ID NO: 11727 - RNA, 19 nt, synthetic construct
  source 1..19: mol_type = other RNA
ggttactggcaattccaca

SEQ ID NO: 11728 - RNA, 19 nt, synthetic construct
  source 1..19: mol_type = other RNA
aggttactggcaattccac

SEQ ID NO: 11729 - RNA, 19 nt, synthetic construct
  source 1..19: mol_type = other RNA
caggttactggcaattcca

SEQ ID NO: 11730 - RNA, 19 nt, synthetic construct
  source 1..19: mol_type = other RNA
ccaggttactggcaattcc

SEQ ID NO: 11731 - RNA, 19 nt, synthetic construct
  source 1..19: mol_type = other RNA
tccaggttactggcaattc

SEQ ID NO: 11732 - RNA, 19 nt, synthetic construct
  source 1..19: mol_type = other RNA
atccaggttactggcaatt

SEQ ID NO: 11733 - RNA, 19 nt, synthetic construct
  source 1..19: mol_type = other RNA
catccaggttactggcaat

SEQ ID NO: 11734 - RNA, 19 nt, synthetic construct
  source 1..19: mol_type = other RNA
ccatccaggttactggcaa

SEQ ID NO: 11735 - RNA, 19 nt, synthetic construct
  source 1..19: mol_type = other RNA
cccatccaggttactggca

SEQ ID NO: 11736 - RNA, 19 nt, synthetic construct
  source 1..19: mol_type = other RNA
ccccatccaggttactggc

SEQ ID NO: 11737 - RNA, 19 nt, synthetic construct
  source 1..19: mol_type = other RNA
tccccatccaggttactgg

SEQ ID NO: 11738 - RNA, 19 nt, synthetic construct
  source 1..19: mol_type = other RNA
ttccccatccaggttactg

SEQ ID NO: 11739 - RNA, 19 nt, synthetic construct
  source 1..19: mol_type = other RNA
tttccccatccaggttact

SEQ ID NO: 11740 - RNA, 19 nt, synthetic construct
  source 1..19: mol_type = other RNA
ttttccccatccaggttac

SEQ ID NO: 11741 - RNA, 19 nt, synthetic construct
  source 1..19: mol_type = other RNA
cttttccccatccaggtta

SEQ ID NO: 11742 - RNA, 19 nt, synthetic construct
  source 1..19: mol_type = other RNA
gcttttccccatccaggtt

SEQ ID NO: 11743 - RNA, 19 nt, synthetic construct
  source 1..19: mol_type = other RNA
tgcttttccccatccaggt

SEQ ID NO: 11744 - RNA, 19 nt, synthetic construct
  source 1..19: mol_type = other RNA
atgcttttccccatccagg

SEQ ID NO: 11745 - RNA, 19 nt, synthetic construct
  source 1..19: mol_type = other RNA
aatgcttttccccatccag

SEQ ID NO: 11746 - RNA, 19 nt, synthetic construct
  source 1..19: mol_type = other RNA
aaatgcttttccccatcca

SEQ ID NO: 11747 - RNA, 19 nt, synthetic construct
  source 1..19: mol_type = other RNA
gaaatgcttttccccatcc

SEQ ID NO: 11748 - RNA, 19 nt, synthetic construct
  source 1..19: mol_type = other RNA
ggaaatgcttttccccatc

SEQ ID NO: 11749 - RNA, 19 nt, synthetic construct
  source 1..19: mol_type = other RNA
gggaaatgcttttccccat

SEQ ID NO: 11750 - RNA, 19 nt, synthetic construct
  source 1..19: mol_type = other RNA
tgggaaatgcttttcccca

SEQ ID NO: 11751 - RNA, 19 nt, synthetic construct
  source 1..19: mol_type = other RNA
atgggaaatgcttttcccc

SEQ ID NO: 11752 - RNA, 19 nt, synthetic construct
  source 1..19: mol_type = other RNA
tatgggaaatgcttttccc

SEQ ID NO: 11753 - RNA, 19 nt, synthetic construct
  source 1..19: mol_type = other RNA
ctatgggaaatgcttttcc

SEQ ID NO: 11754 - RNA, 19 nt, synthetic construct
  source 1..19: mol_type = other RNA
gctatgggaaatgcttttc

SEQ ID NO: 11755 - RNA, 19 nt, synthetic construct
  source 1..19: mol_type = other RNA
tgctatgggaaatgctttt

SEQ ID NO: 11756 - RNA, 19 nt, synthetic construct
  source 1..19: mol_type = other RNA
gtgctatgggaaatgcttt

SEQ ID NO: 11757 - RNA, 19 nt, synthetic construct
  source 1..19: mol_type = other RNA
agtgctatgggaaatgctt

SEQ ID NO: 11758 - RNA, 19 nt, synthetic construct
  source 1..19: mol_type = other RNA
gagtgctatgggaaatgct

SEQ ID NO: 11759 - RNA, 19 nt, synthetic construct
  source 1..19: mol_type = other RNA
ggagtgctatgggaaatgc

SEQ ID NO: 11760 - RNA, 19 nt, synthetic construct
  source 1..19: mol_type = other RNA
tggagtgctatgggaaatg

SEQ ID NO: 11761 - RNA, 19 nt, synthetic construct
  source 1..19: mol_type = other RNA
atggagtgctatgggaaat

SEQ ID NO: 11762 - RNA, 19 nt, synthetic construct
  source 1..19: mol_type = other RNA
catggagtgctatgggaaa

SEQ ID NO: 11763 - RNA, 19 nt, synthetic construct
  source 1..19: mol_type = other RNA
acatggagtgctatgggaa

SEQ ID NO: 11764 - RNA, 19 nt, synthetic construct
  source 1..19: mol_type = other RNA
tacatggagtgctatggga

SEQ ID NO: 11765 - RNA, 19 nt, synthetic construct
  source 1..19: mol_type = other RNA
ttacatggagtgctatggg

SEQ ID NO: 11766 - RNA, 19 nt, synthetic construct
  source 1..19: mol_type = other RNA
attacatggagtgctatgg

SEQ ID NO: 11767 - RNA, 19 nt, synthetic construct
  source 1..19: mol_type = other RNA
tattacatggagtgctatg

SEQ ID NO: 11768 - RNA, 19 nt, synthetic construct
  source 1..19: mol_type = other RNA
atattacatggagtgctat

SEQ ID NO: 11769 - RNA, 19 nt, synthetic construct
  source 1..19: mol_type = other RNA
catattacatggagtgcta

SEQ ID NO: 11770 - RNA, 19 nt, synthetic construct
  source 1..19: mol_type = other RNA
tcatattacatggagtgct

SEQ ID NO: 11771 - RNA, 19 nt, synthetic construct
  source 1..19: mol_type = other RNA
ctcatattacatggagtgc

SEQ ID NO: 11772 - RNA, 19 nt, synthetic construct
  source 1..19: mol_type = other RNA
actcatattacatggagtg

SEQ ID NO: 11773 - RNA, 19 nt, synthetic construct
  source 1..19: mol_type = other RNA
cactcatattacatggagt

SEQ ID NO: 11774 - RNA, 19 nt, synthetic construct
  source 1..19: mol_type = other RNA
gcactcatattacatggag

SEQ ID NO: 11775 - RNA, 19 nt, synthetic construct
  source 1..19: mol_type = other RNA
agcactcatattacatgga

SEQ ID NO: 11776 - RNA, 19 nt, synthetic construct
  source 1..19: mol_type = other RNA
gagcactcatattacatgg

SEQ ID NO: 11777 - RNA, 19 nt, synthetic construct
  source 1..19: mol_type = other RNA
agagcactcatattacatg

SEQ ID NO: 11778 - RNA, 19 nt, synthetic construct
  source 1..19: mol_type = other RNA
cagagcactcatattacat

SEQ ID NO: 11779 - RNA, 19 nt, synthetic construct
  source 1..19: mol_type = other RNA
acagagcactcatattaca

SEQ ID NO: 11780 - RNA, 19 nt, synthetic construct
  source 1..19: mol_type = other RNA
cacagagcactcatattac

SEQ ID NO: 11781 - RNA, 19 nt, synthetic construct
  source 1..19: mol_type = other RNA
tcacagagcactcatatta

SEQ ID NO: 11782 - RNA, 19 nt, synthetic construct
  source 1..19: mol_type = other RNA
ctcacagagcactcatatt

SEQ ID NO: 11783 - RNA, 19 nt, synthetic construct
  source 1..19: mol_type = other RNA
tctcacagagcactcatat

SEQ ID NO: 11784 - RNA, 19 nt, synthetic construct
  source 1..19: mol_type = other RNA
atctcacagagcactcata

SEQ ID NO: 11785 - RNA, 19 nt, synthetic construct
  source 1..19: mol_type = other RNA
catctcacagagcactcat

SEQ ID NO: 11786 - RNA, 19 nt, synthetic construct
  source 1..19: mol_type = other RNA
acatctcacagagcactca

SEQ ID NO: 11787 - RNA, 19 nt, synthetic construct
  source 1..19: mol_type = other RNA
aacatctcacagagcactc

SEQ ID NO: 11788 - RNA, 19 nt, synthetic construct
  source 1..19: mol_type = other RNA
gaacatctcacagagcact

SEQ ID NO: 11789 - RNA, 19 nt, synthetic construct
  source 1..19: mol_type = other RNA
tgaacatctcacagagcac

SEQ ID NO: 11790 - RNA, 19 nt, synthetic construct
  source 1..19: mol_type = other RNA
atgaacatctcacagagca

SEQ ID NO: 11791 - RNA, 19 nt, synthetic construct
  source 1..19: mol_type = other RNA
gatgaacatctcacagagc

SEQ ID NO: 11792 - RNA, 19 nt, synthetic construct
  source 1..19: mol_type = other RNA
tgatgaacatctcacagag

SEQ ID NO: 11793 - RNA, 19 nt, synthetic construct
  source 1..19: mol_type = other RNA
ctgatgaacatctcacaga

SEQ ID NO: 11794 - RNA, 19 nt, synthetic construct
  source 1..19: mol_type = other RNA
actgatgaacatctcacag

SEQ ID NO: 11795 - RNA, 19 nt, synthetic construct
  source 1..19: mol_type = other RNA
cactgatgaacatctcaca

SEQ ID NO: 11796 - RNA, 19 nt, synthetic construct
  source 1..19: mol_type = other RNA
acactgatgaacatctcac

SEQ ID NO: 11797 - RNA, 19 nt, synthetic construct
  source 1..19: mol_type = other RNA
aacactgatgaacatctca

SEQ ID NO: 11798 - RNA, 19 nt, synthetic construct
  source 1..19: mol_type = other RNA
aaacactgatgaacatctc

SEQ ID NO: 11799 - RNA, 19 nt, synthetic construct
  source 1..19: mol_type = other RNA
aaaacactgatgaacatct

SEQ ID NO: 11800 - RNA, 19 nt, synthetic construct
  source 1..19: mol_type = other RNA
taaaacactgatgaacatc

SEQ ID NO: 11801 - RNA, 19 nt, synthetic construct
  source 1..19: mol_type = other RNA
ataaaacactgatgaacat

SEQ ID NO: 11802 - RNA, 19 nt, synthetic construct
  source 1..19: mol_type = other RNA
tataaaacactgatgaaca

SEQ ID NO: 11803 - RNA, 19 nt, synthetic construct
  source 1..19: mol_type = other RNA
ctataaaacactgatgaac

SEQ ID NO: 11804 - RNA, 19 nt, synthetic construct
  source 1..19: mol_type = other RNA
tctataaaacactgatgaa

SEQ ID NO: 11805 - RNA, 19 nt, synthetic construct
  source 1..19: mol_type = other RNA
ttctataaaacactgatga

SEQ ID NO: 11806 - RNA, 19 nt, synthetic construct
  source 1..19: mol_type = other RNA
tttctataaaacactgatg

SEQ ID NO: 11807 - RNA, 19 nt, synthetic construct
  source 1..19: mol_type = other RNA
atttctataaaacactgat

SEQ ID NO: 11808 - RNA, 19 nt, synthetic construct
  source 1..19: mol_type = other RNA
catttctataaaacactga

SEQ ID NO: 11809 - RNA, 19 nt, synthetic construct
  source 1..19: mol_type = other RNA
ccatttctataaaacactg

SEQ ID NO: 11810 - RNA, 19 nt, synthetic construct
  source 1..19: mol_type = other RNA
accatttctataaaacact

SEQ ID NO: 11811 - RNA, 19 nt, synthetic construct
  source 1..19: mol_type = other RNA
caccatttctataaaacac

SEQ ID NO: 11812 - RNA, 19 nt, synthetic construct
  source 1..19: mol_type = other RNA
acaccatttctataaaaca

SEQ ID NO: 11813 - RNA, 19 nt, synthetic construct
  source 1..19: mol_type = other RNA
aacaccatttctataaaac

SEQ ID NO: 11814 - RNA, 19 nt, synthetic construct
  source 1..19: mol_type = other RNA
caacaccatttctataaaa

SEQ ID NO: 11815 - RNA, 19 nt, synthetic construct
  source 1..19: mol_type = other RNA
gcaacaccatttctataaa

SEQ ID NO: 11816 - RNA, 19 nt, synthetic construct
  source 1..19: mol_type = other RNA
agcaacaccatttctataa

SEQ ID NO: 11817 - RNA, 19 nt, synthetic construct
  source 1..19: mol_type = other RNA
cagcaacaccatttctata

SEQ ID NO: 11818 - RNA, 19 nt, synthetic construct
  source 1..19: mol_type = other RNA
ccagcaacaccatttctat

SEQ ID NO: 11819 - RNA, 19 nt, synthetic construct
  source 1..19: mol_type = other RNA
cccagcaacaccatttcta

SEQ ID NO: 11820 - RNA, 19 nt, synthetic construct
  source 1..19: mol_type = other RNA
tcccagcaacaccatttct

SEQ ID NO: 11821 - RNA, 19 nt, synthetic construct
  source 1..19: mol_type = other RNA
ttcccagcaacaccatttc

SEQ ID NO: 11822 - RNA, 19 nt, synthetic construct
  source 1..19: mol_type = other RNA
tttcccagcaacaccattt

SEQ ID NO: 11823 - RNA, 19 nt, synthetic construct
  source 1..19: mol_type = other RNA
gtttcccagcaacaccatt

SEQ ID NO: 11824 - RNA, 19 nt, synthetic construct
  source 1..19: mol_type = other RNA
ggtttcccagcaacaccat

SEQ ID NO: 11825 - RNA, 19 nt, synthetic construct
  source 1..19: mol_type = other RNA
tggtttcccagcaacacca

SEQ ID NO: 11826 - RNA, 19 nt, synthetic construct
  source 1..19: mol_type = other RNA
ttggtttcccagcaacacc

SEQ ID NO: 11827 - RNA, 19 nt, synthetic construct
  source 1..19: mol_type = other RNA
cttggtttcccagcaacac

SEQ ID NO: 11828 - RNA, 19 nt, synthetic construct
  source 1..19: mol_type = other RNA
acttggtttcccagcaaca

SEQ ID NO: 11829 - RNA, 19 nt, synthetic construct
  source 1..19: mol_type = other RNA
aacttggtttcccagcaac

SEQ ID NO: 11830 - RNA, 19 nt, synthetic construct
  source 1..19: mol_type = other RNA
aaacttggtttcccagcaa

SEQ ID NO: 11831 - RNA, 19 nt, synthetic construct
  source 1..19: mol_type = other RNA
caaacttggtttcccagca

SEQ ID NO: 11832 - RNA, 19 nt, synthetic construct
  source 1..19: mol_type = other RNA
gcaaacttggtttcccagc

SEQ ID NO: 11833 - RNA, 19 nt, synthetic construct
  source 1..19: mol_type = other RNA
tgcaaacttggtttcccag

SEQ ID NO: 11834 - RNA, 19 nt, synthetic construct
  source 1..19: mol_type = other RNA
gtgcaaacttggtttccca

SEQ ID NO: 11835 - RNA, 19 nt, synthetic construct
  source 1..19: mol_type = other RNA
ggtgcaaacttggtttccc

SEQ ID NO: 11836 - RNA, 19 nt, synthetic construct
  source 1..19: mol_type = other RNA
aggtgcaaacttggtttcc

SEQ ID NO: 11837 - RNA, 19 nt, synthetic construct
  source 1..19: mol_type = other RNA
caggtgcaaacttggtttc

SEQ ID NO: 11838 - RNA, 19 nt, synthetic construct
  source 1..19: mol_type = other RNA
ccaggtgcaaacttggttt

SEQ ID NO: 11839 - RNA, 19 nt, synthetic construct
  source 1..19: mol_type = other RNA
tccaggtgcaaacttggtt

SEQ ID NO: 11840 - RNA, 19 nt, synthetic construct
  source 1..19: mol_type = other RNA
ttccaggtgcaaacttggt

SEQ ID NO: 11841 - RNA, 19 nt, synthetic construct
  source 1..19: mol_type = other RNA
tttccaggtgcaaacttgg

SEQ ID NO: 11842 - RNA, 19 nt, synthetic construct
  source 1..19: mol_type = other RNA
gtttccaggtgcaaacttg

SEQ ID NO: 11843 - RNA, 19 nt, synthetic construct
  source 1..19: mol_type = other RNA
agtttccaggtgcaaactt

SEQ ID NO: 11844 - RNA, 19 nt, synthetic construct
  source 1..19: mol_type = other RNA
aagtttccaggtgcaaact

SEQ ID NO: 11845 - RNA, 19 nt, synthetic construct
  source 1..19: mol_type = other RNA
taagtttccaggtgcaaac

SEQ ID NO: 11846 - RNA, 19 nt, synthetic construct
  source 1..19: mol_type = other RNA
gtaagtttccaggtgcaaa

SEQ ID NO: 11847 - RNA, 19 nt, synthetic construct
  source 1..19: mol_type = other RNA
tgtaagtttccaggtgcaa

SEQ ID NO: 11848 - RNA, 19 nt, synthetic construct
  source 1..19: mol_type = other RNA
ttgtaagtttccaggtgca

SEQ ID NO: 11849 - RNA, 19 nt, synthetic construct
  source 1..19: mol_type = other RNA
attgtaagtttccaggtgc

SEQ ID NO: 11850 - RNA, 19 nt, synthetic construct
  source 1..19: mol_type = other RNA
cattgtaagtttccaggtg

SEQ ID NO: 11851 - RNA, 19 nt, synthetic construct
  source 1..19: mol_type = other RNA
gcattgtaagtttccaggt

SEQ ID NO: 11852 - RNA, 19 nt, synthetic construct
  source 1..19: mol_type = other RNA
tgcattgtaagtttccagg

SEQ ID NO: 11853 - RNA, 19 nt, synthetic construct
  source 1..19: mol_type = other RNA
gtgcattgtaagtttccag

SEQ ID NO: 11854 - RNA, 19 nt, synthetic construct
  source 1..19: mol_type = other RNA
agtgcattgtaagtttcca

SEQ ID NO: 11855 - RNA, 19 nt, synthetic construct
  source 1..19: mol_type = other RNA
aagtgcattgtaagtttcc

SEQ ID NO: 11856 - RNA, 19 nt, synthetic construct
  source 1..19: mol_type = other RNA
aaagtgcattgtaagtttc

SEQ ID NO: 11857 - RNA, 19 nt, synthetic construct
  source 1..19: mol_type = other RNA
taaagtgcattgtaagttt

SEQ ID NO: 11858 - RNA, 19 nt, synthetic construct
  source 1..19: mol_type = other RNA
ctaaagtgcattgtaagtt

SEQ ID NO: 11859 - RNA, 19 nt, synthetic construct
  source 1..19: mol_type = other RNA
gctaaagtgcattgtaagt

SEQ ID NO: 11860 - RNA, 19 nt, synthetic construct
  source 1..19: mol_type = other RNA
cgctaaagtgcattgtaag

SEQ ID NO: 11861 - RNA, 19 nt, synthetic construct
  source 1..19: mol_type = other RNA
gcgctaaagtgcattgtaa

SEQ ID NO: 11862 - RNA, 19 nt, synthetic construct
  source 1..19: mol_type = other RNA
tgcgctaaagtgcattgta

SEQ ID NO: 11863 - RNA, 19 nt, synthetic construct
  source 1..19: mol_type = other RNA
ctgcgctaaagtgcattgt

SEQ ID NO: 11864 - RNA, 19 nt, synthetic construct
  source 1..19: mol_type = other RNA
actgcgctaaagtgcattg

SEQ ID NO: 11865 - RNA, 19 nt, synthetic construct
  source 1..19: mol_type = other RNA
tactgcgctaaagtgcatt

SEQ ID NO: 11866 - RNA, 19 nt, synthetic construct
  source 1..19: mol_type = other RNA
ttactgcgctaaagtgcat

SEQ ID NO: 11867 - RNA, 19 nt, synthetic construct
  source 1..19: mol_type = other RNA
cttactgcgctaaagtgca

SEQ ID NO: 11868 - RNA, 19 nt, synthetic construct
  source 1..19: mol_type = other RNA
ccttactgcgctaaagtgc

SEQ ID NO: 11869 - RNA, 19 nt, synthetic construct
  source 1..19: mol_type = other RNA
cccttactgcgctaaagtg

SEQ ID NO: 11870 - RNA, 19 nt, synthetic construct
  source 1..19: mol_type = other RNA
gcccttactgcgctaaagt

SEQ ID NO: 11871 - RNA, 19 nt, synthetic construct
  source 1..19: mol_type = other RNA
agcccttactgcgctaaag

SEQ ID NO: 11872 - RNA, 19 nt, synthetic construct
  source 1..19: mol_type = other RNA
aagcccttactgcgctaaa

SEQ ID NO: 11873 - RNA, 19 nt, synthetic construct
  source 1..19: mol_type = other RNA
caagcccttactgcgctaa

SEQ ID NO: 11874 - RNA, 19 nt, synthetic construct
  source 1..19: mol_type = other RNA
ccaagcccttactgcgcta

SEQ ID NO: 11875 - RNA, 19 nt, synthetic construct
  source 1..19: mol_type = other RNA
gccaagcccttactgcgct

SEQ ID NO: 11876 - RNA, 19 nt, synthetic construct
  source 1..19: mol_type = other RNA
tgccaagcccttactgcgc

SEQ ID NO: 11877 - RNA, 19 nt, synthetic construct
  source 1..19: mol_type = other RNA
atgccaagcccttactgcg

SEQ ID NO: 11878 - RNA, 19 nt, synthetic construct
  source 1..19: mol_type = other RNA
gatgccaagcccttactgc

SEQ ID NO: 11879 - RNA, 19 nt, synthetic construct
  source 1..19: mol_type = other RNA
ggatgccaagcccttactg

SEQ ID NO: 11880 - RNA, 19 nt, synthetic construct
  source 1..19: mol_type = other RNA
cggatgccaagcccttact

SEQ ID NO: 11881 - RNA, 19 nt, synthetic construct
  source 1..19: mol_type = other RNA
ccggatgccaagcccttac

SEQ ID NO: 11882 - RNA, 19 nt, synthetic construct
  source 1..19: mol_type = other RNA
accggatgccaagccctta

SEQ ID NO: 11883 - RNA, 19 nt, synthetic construct
  source 1..19: mol_type = other RNA
taccggatgccaagccctt

SEQ ID NO: 11884 - RNA, 19 nt, synthetic construct
  source 1..19: mol_type = other RNA
ctaccggatgccaagccct

SEQ ID NO: 11885 - RNA, 19 nt, synthetic construct
  source 1..19: mol_type = other RNA
actaccggatgccaagccc

SEQ ID NO: 11886 - RNA, 19 nt, synthetic construct
  source 1..19: mol_type = other RNA
cactaccggatgccaagcc

SEQ ID NO: 11887 - RNA, 19 nt, synthetic construct
  source 1..19: mol_type = other RNA
tcactaccggatgccaagc

SEQ ID NO: 11888 - RNA, 19 nt, synthetic construct
  source 1..19: mol_type = other RNA
ttcactaccggatgccaag

SEQ ID NO: 11889 - RNA, 19 nt, synthetic construct
  source 1..19: mol_type = other RNA
tttcactaccggatgccaa

SEQ ID NO: 11890 - RNA, 19 nt, synthetic construct
  source 1..19: mol_type = other RNA
ttttcactaccggatgcca

SEQ ID NO: 11891 - RNA, 19 nt, synthetic construct
  source 1..19: mol_type = other RNA
tttttcactaccggatgcc

SEQ ID NO: 11892 - RNA, 19 nt, synthetic construct
  source 1..19: mol_type = other RNA
gtttttcactaccggatgc

SEQ ID NO: 11893 - RNA, 19 nt, synthetic construct
  source 1..19: mol_type = other RNA
agtttttcactaccggatg

SEQ ID NO: 11894 - RNA, 19 nt, synthetic construct
  source 1..19: mol_type = other RNA
cagtttttcactaccggat

SEQ ID NO: 11895 - RNA, 19 nt, synthetic construct
  source 1..19: mol_type = other RNA
acagtttttcactaccgga

SEQ ID NO: 11896 - RNA, 19 nt, synthetic construct
  source 1..19: mol_type = other RNA
gacagtttttcactaccgg

SEQ ID NO: 11897 - RNA, 19 nt, synthetic construct
  source 1..19: mol_type = other RNA
agacagtttttcactaccg

SEQ ID NO: 11898 - RNA, 19 nt, synthetic construct
  source 1..19: mol_type = other RNA
tagacagtttttcactacc

SEQ ID NO: 11899 - RNA, 19 nt, synthetic construct
  source 1..19: mol_type = other RNA
ttagacagtttttcactac

SEQ ID NO: 11900 - RNA, 19 nt, synthetic construct
  source 1..19: mol_type = other RNA
gttagacagtttttcacta

SEQ ID NO: 11901 - RNA, 19 nt, synthetic construct
  source 1..19: mol_type = other RNA
ggttagacagtttttcact

SEQ ID NO: 11902 - RNA, 19 nt, synthetic construct
  source 1..19: mol_type = other RNA
gggttagacagtttttcac

SEQ ID NO: 11903 - RNA, 19 nt, synthetic construct
  source 1..19: mol_type = other RNA
tgggttagacagtttttca

SEQ ID NO: 11904 - RNA, 19 nt, synthetic construct
  source 1..19: mol_type = other RNA
ctgggttagacagtttttc

SEQ ID NO: 11905 - RNA, 19 nt, synthetic construct
  source 1..19: mol_type = other RNA
gctgggttagacagttttt

SEQ ID NO: 11906 - RNA, 19 nt, synthetic construct
  source 1..19: mol_type = other RNA
tgctgggttagacagtttt

SEQ ID NO: 11907 - RNA, 19 nt, synthetic construct
  source 1..19: mol_type = other RNA
atgctgggttagacagttt

SEQ ID NO: 11908 - RNA, 19 nt, synthetic construct
  source 1..19: mol_type = other RNA
aatgctgggttagacagtt

SEQ ID NO: 11909 - RNA, 19 nt, synthetic construct
  source 1..19: mol_type = other RNA
caatgctgggttagacagt

SEQ ID NO: 11910 - RNA, 19 nt, synthetic construct
  source 1..19: mol_type = other RNA
gcaatgctgggttagacag

SEQ ID NO: 11911 - RNA, 19 nt, synthetic construct
  source 1..19: mol_type = other RNA
ggcaatgctgggttagaca

SEQ ID NO: 11912 - RNA, 19 nt, synthetic construct
  source 1..19: mol_type = other RNA
gggcaatgctgggttagac

SEQ ID NO: 11913 - RNA, 19 nt, synthetic construct
  source 1..19: mol_type = other RNA
tgggcaatgctgggttaga

SEQ ID NO: 11914 - RNA, 19 nt, synthetic construct
  source 1..19: mol_type = other RNA
ttgggcaatgctgggttag

SEQ ID NO: 11915 - RNA, 19 nt, synthetic construct
  source 1..19: mol_type = other RNA
tttgggcaatgctgggtta

SEQ ID NO: 11916 - RNA, 19 nt, synthetic construct
  source 1..19: mol_type = other RNA
gtttgggcaatgctgggtt

SEQ ID NO: 11917 - RNA, 19 nt, synthetic construct
  source 1..19: mol_type = other RNA
agtttgggcaatgctgggt

SEQ ID NO: 11918 - RNA, 19 nt, synthetic construct
  source 1..19: mol_type = other RNA
tagtttgggcaatgctggg

SEQ ID NO: 11919 - RNA, 19 nt, synthetic construct
  source 1..19: mol_type = other RNA
atagtttgggcaatgctgg

SEQ ID NO: 11920 - RNA, 19 nt, synthetic construct
  source 1..19: mol_type = other RNA
aatagtttgggcaatgctg

SEQ ID NO: 11921 - RNA, 19 nt, synthetic construct
  source 1..19: mol_type = other RNA
aaatagtttgggcaatgct

SEQ ID NO: 11922 - RNA, 19 nt, synthetic construct
  source 1..19: mol_type = other RNA
aaaatagtttgggcaatgc

SEQ ID NO: 11923 - RNA, 19 nt, synthetic construct
  source 1..19: mol_type = other RNA
caaaatagtttgggcaatg

SEQ ID NO: 11924 - RNA, 19 nt, synthetic construct
  source 1..19: mol_type = other RNA
tcaaaatagtttgggcaat

SEQ ID NO: 11925 - RNA, 19 nt, synthetic construct
  source 1..19: mol_type = other RNA
gtcaaaatagtttgggcaa

SEQ ID NO: 11926 - RNA, 19 nt, synthetic construct
  source 1..19: mol_type = other RNA
tgtcaaaatagtttgggca

SEQ ID NO: 11927 - RNA, 19 nt, synthetic construct
  source 1..19: mol_type = other RNA
gtgtcaaaatagtttgggc

SEQ ID NO: 11928 - RNA, 19 nt, synthetic construct
  source 1..19: mol_type = other RNA
ggtgtcaaaatagtttggg

SEQ ID NO: 11929 - RNA, 19 nt, synthetic construct
  source 1..19: mol_type = other RNA
tggtgtcaaaatagtttgg

SEQ ID NO: 11930 - RNA, 19 nt, synthetic construct
  source 1..19: mol_type = other RNA
ctggtgtcaaaatagtttg

SEQ ID NO: 11931 - RNA, 19 nt, synthetic construct
  source 1..19: mol_type = other RNA
cctggtgtcaaaatagttt

SEQ ID NO: 11932 - RNA, 19 nt, synthetic construct
  source 1..19: mol_type = other RNA
tcctggtgtcaaaatagtt

SEQ ID NO: 11933 - RNA, 19 nt, synthetic construct
  source 1..19: mol_type = other RNA
gtcctggtgtcaaaatagt

SEQ ID NO: 11934 - RNA, 19 nt, synthetic construct
  source 1..19: mol_type = other RNA
ggtcctggtgtcaaaatag

SEQ ID NO: 11935 - RNA, 19 nt, synthetic construct
  source 1..19: mol_type = other RNA
aggtcctggtgtcaaaata

SEQ ID NO: 11936 - RNA, 19 nt, synthetic construct
  source 1..19: mol_type = other RNA
aaggtcctggtgtcaaaat

SEQ ID NO: 11937 - RNA, 19 nt, synthetic construct
  source 1..19: mol_type = other RNA
aaaggtcctggtgtcaaaa

SEQ ID NO: 11938 - RNA, 19 nt, synthetic construct
  source 1..19: mol_type = other RNA
aaaaggtcctggtgtcaaa

SEQ ID NO: 11939 - RNA, 19 nt, synthetic construct
  source 1..19: mol_type = other RNA
aaaaaggtcctggtgtcaa

SEQ ID NO: 11940 - RNA, 19 nt, synthetic construct
  source 1..19: mol_type = other RNA
gaaaaaggtcctggtgtca

SEQ ID NO: 11941 - RNA, 19 nt, synthetic construct
  source 1..19: mol_type = other RNA
agaaaaaggtcctggtgtc

SEQ ID NO: 11942 - RNA, 19 nt, synthetic construct
  source 1..19: mol_type = other RNA
gagaaaaaggtcctggtgt

SEQ ID NO: 11943 - RNA, 19 nt, synthetic construct
  source 1..19: mol_type = other RNA
ggagaaaaaggtcctggtg

SEQ ID NO: 11944 - RNA, 19 nt, synthetic construct
  source 1..19: mol_type = other RNA
aggagaaaaaggtcctggt

SEQ ID NO: 11945 - RNA, 19 nt, synthetic construct
  source 1..19: mol_type = other RNA
aaggagaaaaaggtcctgg

SEQ ID NO: 11946 - RNA, 19 nt, synthetic construct
  source 1..19: mol_type = other RNA
aaaggagaaaaaggtcctg

SEQ ID NO: 11947 - RNA, 19 nt, synthetic construct
  source 1..19: mol_type = other RNA
caaaggagaaaaaggtcct

SEQ ID NO: 11948 - RNA, 19 nt, synthetic construct
  source 1..19: mol_type = other RNA
ccaaaggagaaaaaggtcc

SEQ ID NO: 11949 - RNA, 19 nt, synthetic construct
  source 1..19: mol_type = other RNA
cccaaaggagaaaaaggtc

SEQ ID NO: 11950 - RNA, 19 nt, synthetic construct
  source 1..19: mol_type = other RNA
tcccaaaggagaaaaaggt

SEQ ID NO: 11951 - RNA, 19 nt, synthetic construct
  source 1..19: mol_type = other RNA
atcccaaaggagaaaaagg

SEQ ID NO: 11952 - RNA, 19 nt, synthetic construct
  source 1..19: mol_type = other RNA
tatcccaaaggagaaaaag

SEQ ID NO: 11953 - RNA, 19 nt, synthetic construct
  source 1..19: mol_type = other RNA
gtatcccaaaggagaaaaa

SEQ ID NO: 11954 - RNA, 19 nt, synthetic construct
  source 1..19: mol_type = other RNA
agtatcccaaaggagaaaa

SEQ ID NO: 11955 - RNA, 19 nt, synthetic construct
  source 1..19: mol_type = other RNA
aagtatcccaaaggagaaa

SEQ ID NO: 11956 - RNA, 19 nt, synthetic construct
  source 1..19: mol_type = other RNA
taagtatcccaaaggagaa

SEQ ID NO: 11957 - RNA, 19 nt, synthetic construct
  source 1..19: mol_type = other RNA
ataagtatcccaaaggaga

SEQ ID NO: 11958 - RNA, 19 nt, synthetic construct
  source 1..19: mol_type = other RNA
cataagtatcccaaaggag

SEQ ID NO: 11959 - RNA, 19 nt, synthetic construct
  source 1..19: mol_type = other RNA
tcataagtatcccaaagga

SEQ ID NO: 11960 - RNA, 19 nt, synthetic construct
  source 1..19: mol_type = other RNA
ttcataagtatcccaaagg

SEQ ID NO: 11961 - RNA, 19 nt, synthetic construct
  source 1..19: mol_type = other RNA
gttcataagtatcccaaag

SEQ ID NO: 11962 - RNA, 19 nt, synthetic construct
  source 1..19: mol_type = other RNA
ggttcataagtatcccaaa

SEQ ID NO: 11963 - RNA, 19 nt, synthetic construct
  source 1..19: mol_type = other RNA
aggttcataagtatcccaa

SEQ ID NO: 11964 - RNA, 19 nt, synthetic construct
  source 1..19: mol_type = other RNA
gaggttcataagtatccca

SEQ ID NO: 11965 - RNA, 19 nt, synthetic construct
  source 1..19: mol_type = other RNA
agaggttcataagtatccc

SEQ ID NO: 11966 - RNA, 19 nt, synthetic construct
  source 1..19: mol_type = other RNA
gagaggttcataagtatcc

SEQ ID NO: 11967 - RNA, 19 nt, synthetic construct
  source 1..19: mol_type = other RNA
tgagaggttcataagtatc

SEQ ID NO: 11968 - RNA, 19 nt, synthetic construct
  source 1..19: mol_type = other RNA
gtgagaggttcataagtat

SEQ ID NO: 11969 - RNA, 19 nt, synthetic construct
  source 1..19: mol_type = other RNA
agtgagaggttcataagta

SEQ ID NO: 11970 - RNA, 19 nt, synthetic construct
  source 1..19: mol_type = other RNA
tagtgagaggttcataagt

SEQ ID NO: 11971 - RNA, 19 nt, synthetic construct
  source 1..19: mol_type = other RNA
ttagtgagaggttcataag

SEQ ID NO: 11972 - RNA, 19 nt, synthetic construct
  source 1..19: mol_type = other RNA
attagtgagaggttcataa

SEQ ID NO: 11973 - RNA, 19 nt, synthetic construct
  source 1..19: mol_type = other RNA
cattagtgagaggttcata

SEQ ID NO: 11974 - RNA, 19 nt, synthetic construct
  source 1..19: mol_type = other RNA
acattagtgagaggttcat

SEQ ID NO: 11975 - RNA, 19 nt, synthetic construct
  source 1..19: mol_type = other RNA
gacattagtgagaggttca

SEQ ID NO: 11976 - RNA, 19 nt, synthetic construct
  source 1..19: mol_type = other RNA
ggacattagtgagaggttc

SEQ ID NO: 11977 - RNA, 19 nt, synthetic construct
  source 1..19: mol_type = other RNA
aggacattagtgagaggtt

SEQ ID NO: 11978 - RNA, 19 nt, synthetic construct
  source 1..19: mol_type = other RNA
caggacattagtgagaggt

SEQ ID NO: 11979 - RNA, 19 nt, synthetic construct
  source 1..19: mol_type = other RNA
acaggacattagtgagagg

SEQ ID NO: 11980 - RNA, 19 nt, synthetic construct
  source 1..19: mol_type = other RNA
cacaggacattagtgagag

SEQ ID NO: 11981 - RNA, 19 nt, synthetic construct
  source 1..19: mol_type = other RNA
ccacaggacattagtgaga

SEQ ID NO: 11982 - RNA, 19 nt, synthetic construct
  source 1..19: mol_type = other RNA
tccacaggacattagtgag

SEQ ID NO: 11983 - RNA, 19 nt, synthetic construct
  source 1..19: mol_type = other RNA
ctccacaggacattagtga

SEQ ID NO: 11984 - RNA, 19 nt, synthetic construct
  source 1..19: mol_type = other RNA
tctccacaggacattagtg

SEQ ID NO: 11985 - RNA, 19 nt, synthetic construct
  source 1..19: mol_type = other RNA
ttctccacaggacattagt

SEQ ID NO: 11986 - RNA, 19 nt, synthetic construct
  source 1..19: mol_type = other RNA
gttctccacaggacattag

SEQ ID NO: 11987 - RNA, 19 nt, synthetic construct
  source 1..19: mol_type = other RNA
tgttctccacaggacatta

SEQ ID NO: 11988 - RNA, 19 nt, synthetic construct
  source 1..19: mol_type = other RNA
atgttctccacaggacatt

SEQ ID NO: 11989 - RNA, 19 nt, synthetic construct
  source 1..19: mol_type = other RNA
aatgttctccacaggacat

SEQ ID NO: 11990 - RNA, 19 nt, synthetic construct
  source 1..19: mol_type = other RNA
aaatgttctccacaggaca

SEQ ID NO: 11991 - RNA, 19 nt, synthetic construct
  source 1..19: mol_type = other RNA
aaaatgttctccacaggac

SEQ ID NO: 11992 - RNA, 19 nt, synthetic construct
  source 1..19: mol_type = other RNA
caaaatgttctccacagga

SEQ ID NO: 11993 - RNA, 19 nt, synthetic construct
  source 1..19: mol_type = other RNA
ccaaaatgttctccacagg

SEQ ID NO: 11994 - RNA, 19 nt, synthetic construct
  source 1..19: mol_type = other RNA
cccaaaatgttctccacag

SEQ ID NO: 11995 - RNA, 19 nt, synthetic construct
  source 1..19: mol_type = other RNA
tcccaaaatgttctccaca

SEQ ID NO: 11996 - RNA, 19 nt, synthetic construct
  source 1..19: mol_type = other RNA
ttcccaaaatgttctccac

SEQ ID NO: 11997 - RNA, 19 nt, synthetic construct
  source 1..19: mol_type = other RNA
tttcccaaaatgttctcca

SEQ ID NO: 11998 - RNA, 19 nt, synthetic construct
  source 1..19: mol_type = other RNA
gtttcccaaaatgttctcc

SEQ ID NO: 11999 - RNA, 19 nt, synthetic construct
  source 1..19: mol_type = other RNA
tgtttcccaaaatgttctc

SEQ ID NO: 12000 - RNA, 19 nt, synthetic construct
  source 1..19: mol_type = other RNA
gtgtttcccaaaatgttct

SEQ ID NO: 12001 - RNA, 19 nt, synthetic construct
  source 1..19: mol_type = other RNA
agtgtttcccaaaatgttc

SEQ ID NO: 12002 - RNA, 19 nt, synthetic construct
  source 1..19: mol_type = other RNA
tagtgtttcccaaaatgtt

SEQ ID NO: 12003 - RNA, 19 nt, synthetic construct
  source 1..19: mol_type = other RNA
atagtgtttcccaaaatgt

SEQ ID NO: 12004 - RNA, 19 nt, synthetic construct
  source 1..19: mol_type = other RNA
catagtgtttcccaaaatg

SEQ ID NO: 12005 - RNA, 19 nt, synthetic construct
  source 1..19: mol_type = other RNA
acatagtgtttcccaaaat

SEQ ID NO: 12006 - RNA, 19 nt, synthetic construct
  source 1..19: mol_type = other RNA
aacatagtgtttcccaaaa

SEQ ID NO: 12007 - RNA, 19 nt, synthetic construct
  source 1..19: mol_type = other RNA
taacatagtgtttcccaaa

SEQ ID NO: 12008 - RNA, 19 nt, synthetic construct
  source 1..19: mol_type = other RNA
ctaacatagtgtttcccaa

SEQ ID NO: 12009 - RNA, 19 nt, synthetic construct
  source 1..19: mol_type = other RNA
tctaacatagtgtttccca

SEQ ID NO: 12010 - RNA, 19 nt, synthetic construct
  source 1..19: mol_type = other RNA
atctaacatagtgtttccc

SEQ ID NO: 12011 - RNA, 19 nt, synthetic construct
  source 1..19: mol_type = other RNA
tatctaacatagtgtttcc

SEQ ID NO: 12012 - RNA, 19 nt, synthetic construct
  source 1..19: mol_type = other RNA
ctatctaacatagtgtttc

SEQ ID NO: 12013 - RNA, 19 nt, synthetic construct
  source 1..19: mol_type = other RNA
actatctaacatagtgttt

SEQ ID NO: 12014 - RNA, 19 nt, synthetic construct
  source 1..19: mol_type = other RNA
aactatctaacatagtgtt

SEQ ID NO: 12015 - RNA, 19 nt, synthetic construct
  source 1..19: mol_type = other RNA
gaactatctaacatagtgt

SEQ ID NO: 12016 - RNA, 19 nt, synthetic construct
  source 1..19: mol_type = other RNA
agaactatctaacatagtg

SEQ ID NO: 12017 - RNA, 19 nt, synthetic construct
  source 1..19: mol_type = other RNA
aagaactatctaacatagt

SEQ ID NO: 12018 - RNA, 19 nt, synthetic construct
  source 1..19: mol_type = other RNA
aaagaactatctaacatag

SEQ ID NO: 12019 - RNA, 19 nt, synthetic construct
  source 1..19: mol_type = other RNA
taaagaactatctaacata

SEQ ID NO: 12020 - RNA, 19 nt, synthetic construct
  source 1..19: mol_type = other RNA
ttaaagaactatctaacat

SEQ ID NO: 12021 - RNA, 19 nt, synthetic construct
  source 1..19: mol_type = other RNA
cttaaagaactatctaaca

SEQ ID NO: 12022 - RNA, 19 nt, synthetic construct
  source 1..19: mol_type = other RNA
ccttaaagaactatctaac

SEQ ID NO: 12023 - RNA, 19 nt, synthetic construct
  source 1..19: mol_type = other RNA
tccttaaagaactatctaa

SEQ ID NO: 12024 - RNA, 19 nt, synthetic construct
  source 1..19: mol_type = other RNA
ctccttaaagaactatcta

SEQ ID NO: 12025 - RNA, 19 nt, synthetic construct
  source 1..19: mol_type = other RNA
tctccttaaagaactatct

SEQ ID NO: 12026 - RNA, 19 nt, synthetic construct
  source 1..19: mol_type = other RNA
gtctccttaaagaactatc

SEQ ID NO: 12027 - RNA, 19 nt, synthetic construct
  source 1..19: mol_type = other RNA
tgtctccttaaagaactat

SEQ ID NO: 12028 - RNA, 19 nt, synthetic construct
  source 1..19: mol_type = other RNA
ttgtctccttaaagaacta

SEQ ID NO: 12029 - RNA, 19 nt, synthetic construct
  source 1..19: mol_type = other RNA
tttgtctccttaaagaact

SEQ ID NO: 12030 - RNA, 19 nt, synthetic construct
  source 1..19: mol_type = other RNA
ttttgtctccttaaagaac

SEQ ID NO: 12031 - RNA, 19 nt, synthetic construct
  source 1..19: mol_type = other RNA
gttttgtctccttaaagaa

SEQ ID NO: 12032 - RNA, 19 nt, synthetic construct
  source 1..19: mol_type = other RNA
cgttttgtctccttaaaga

SEQ ID NO: 12033 - RNA, 19 nt, synthetic construct
  source 1..19: mol_type = other RNA
ccgttttgtctccttaaag

SEQ ID NO: 12034 - RNA, 19 nt, synthetic construct
  source 1..19: mol_type = other RNA
accgttttgtctccttaaa

SEQ ID NO: 12035 - RNA, 19 nt, synthetic construct
  source 1..19: mol_type = other RNA
taccgttttgtctccttaa

SEQ ID NO: 12036 - RNA, 19 nt, synthetic construct
  source 1..19: mol_type = other RNA
ttaccgttttgtctcctta

SEQ ID NO: 12037 - RNA, 19 nt, synthetic construct
  source 1..19: mol_type = other RNA
attaccgttttgtctcctt

SEQ ID NO: 12038 - RNA, 19 nt, synthetic construct
  source 1..19: mol_type = other RNA
cattaccgttttgtctcct

SEQ ID NO: 12039 - RNA, 19 nt, synthetic construct
  source 1..19: mol_type = other RNA
tcattaccgttttgtctcc

SEQ ID NO: 12040 - RNA, 19 nt, synthetic construct
  source 1..19: mol_type = other RNA
ttcattaccgttttgtctc

SEQ ID NO: 12041 - RNA, 19 nt, synthetic construct
  source 1..19: mol_type = other RNA
gttcattaccgttttgtct

SEQ ID NO: 12042 - RNA, 19 nt, synthetic construct
  source 1..19: mol_type = other RNA
tgttcattaccgttttgtc

SEQ ID NO: 12043 - RNA, 19 nt, synthetic construct
  source 1..19: mol_type = other RNA
ctgttcattaccgttttgt

SEQ ID NO: 12044 - RNA, 19 nt, synthetic construct
  source 1..19: mol_type = other RNA
tctgttcattaccgttttg

SEQ ID NO: 12045 - RNA, 19 nt, synthetic construct
  source 1..19: mol_type = other RNA
atctgttcattaccgtttt

SEQ ID NO: 12046 - RNA, 19 nt, synthetic construct
  source 1..19: mol_type = other RNA
tatctgttcattaccgttt

SEQ ID NO: 12047 - RNA, 19 nt, synthetic construct
  source 1..19: mol_type = other RNA
ctatctgttcattaccgtt

SEQ ID NO: 12048 - RNA, 19 nt, synthetic construct
  source 1..19: mol_type = other RNA
gctatctgttcattaccgt

SEQ ID NO: 12049 - RNA, 19 nt, synthetic construct
  source 1..19: mol_type = other RNA
tgctatctgttcattaccg

SEQ ID NO: 12050 - RNA, 19 nt, synthetic construct
  source 1..19: mol_type = other RNA
gtgctatctgttcattacc

SEQ ID NO: 12051 - RNA, 19 nt, synthetic construct
  source 1..19: mol_type = other RNA
agtgctatctgttcattac

SEQ ID NO: 12052 - RNA, 19 nt, synthetic construct
  source 1..19: mol_type = other RNA
cagtgctatctgttcatta

SEQ ID NO: 12053 - RNA, 19 nt, synthetic construct
  source 1..19: mol_type = other RNA
ccagtgctatctgttcatt

SEQ ID NO: 12054 - RNA, 19 nt, synthetic construct
  source 1..19: mol_type = other RNA
cccagtgctatctgttcat

SEQ ID NO: 12055 - RNA, 19 nt, synthetic construct
  source 1..19: mol_type = other RNA
ccccagtgctatctgttca

SEQ ID NO: 12056 - RNA, 19 nt, synthetic construct
  source 1..19: mol_type = other RNA
gccccagtgctatctgttc

SEQ ID NO: 12057 - RNA, 19 nt, synthetic construct
  source 1..19: mol_type = other RNA
tgccccagtgctatctgtt

SEQ ID NO: 12058 - RNA, 19 nt, synthetic construct
  source 1..19: mol_type = other RNA
ctgccccagtgctatctgt

SEQ ID NO: 12059 - RNA, 19 nt, synthetic construct
  source 1..19: mol_type = other RNA
tctgccccagtgctatctg

SEQ ID NO: 12060 - RNA, 19 nt, synthetic construct
  source 1..19: mol_type = other RNA
ttctgccccagtgctatct

SEQ ID NO: 12061 - RNA, 19 nt, synthetic construct
  source 1..19: mol_type = other RNA
attctgccccagtgctatc

SEQ ID NO: 12062 - RNA, 19 nt, synthetic construct
  source 1..19: mol_type = other RNA
tattctgccccagtgctat

SEQ ID NO: 12063 - RNA, 19 nt, synthetic construct
  source 1..19: mol_type = other RNA
atattctgccccagtgcta

SEQ ID NO: 12064 - RNA, 19 nt, synthetic construct
  source 1..19: mol_type = other RNA
catattctgccccagtgct

SEQ ID NO: 12065 - RNA, 19 nt, synthetic construct
  source 1..19: mol_type = other RNA
gcatattctgccccagtgc

SEQ ID NO: 12066 - RNA, 19 nt, synthetic construct
  source 1..19: mol_type = other RNA
tgcatattctgccccagtg

SEQ ID NO: 12067 - RNA, 19 nt, synthetic construct
  source 1..19: mol_type = other RNA
atgcatattctgccccagt

SEQ ID NO: 12068 - RNA, 19 nt, synthetic construct
  source 1..19: mol_type = other RNA
catgcatattctgccccag

SEQ ID NO: 12069 - RNA, 19 nt, synthetic construct
  source 1..19: mol_type = other RNA
gcatgcatattctgcccca

SEQ ID NO: 12070 - RNA, 19 nt, synthetic construct
  source 1..19: mol_type = other RNA
tgcatgcatattctgcccc

SEQ ID NO: 12071 - RNA, 19 nt, synthetic construct
  source 1..19: mol_type = other RNA
atgcatgcatattctgccc

SEQ ID NO: 12072 - RNA, 19 nt, synthetic construct
  source 1..19: mol_type = other RNA
aatgcatgcatattctgcc

SEQ ID NO: 12073 - RNA, 19 nt, synthetic construct
  source 1..19: mol_type = other RNA
aaatgcatgcatattctgc

SEQ ID NO: 12074 - RNA, 19 nt, synthetic construct
  source 1..19: mol_type = other RNA
aaaatgcatgcatattctg

SEQ ID NO: 12075 - RNA, 19 nt, synthetic construct
  source 1..19: mol_type = other RNA
caaaatgcatgcatattct

SEQ ID NO: 12076 - RNA, 19 nt, synthetic construct
  source 1..19: mol_type = other RNA
acaaaatgcatgcatattc

SEQ ID NO: 12077 - RNA, 19 nt, synthetic construct
  source 1..19: mol_type = other RNA
tacaaaatgcatgcatatt

SEQ ID NO: 12078 - RNA, 19 nt, synthetic construct
  source 1..19: mol_type = other RNA
ttacaaaatgcatgcatat

SEQ ID NO: 12079 - RNA, 19 nt, synthetic construct
  source 1..19: mol_type = other RNA
gttacaaaatgcatgcata

SEQ ID NO: 12080 - RNA, 19 nt, synthetic construct
  source 1..19: mol_type = other RNA
cgttacaaaatgcatgcat

SEQ ID NO: 12081 - RNA, 19 nt, synthetic construct
  source 1..19: mol_type = other RNA
acgttacaaaatgcatgca

SEQ ID NO: 12082 - RNA, 19 nt, synthetic construct
  source 1..19: mol_type = other RNA
gacgttacaaaatgcatgc

SEQ ID NO: 12083 - RNA, 19 nt, synthetic construct
  source 1..19: mol_type = other RNA
ggacgttacaaaatgcatg

SEQ ID NO: 12084 - RNA, 19 nt, synthetic construct
  source 1..19: mol_type = other RNA
tggacgttacaaaatgcat

SEQ ID NO: 12085 - RNA, 19 nt, synthetic construct
  source 1..19: mol_type = other RNA
ctggacgttacaaaatgca

SEQ ID NO: 12086 - RNA, 19 nt, synthetic construct
  source 1..19: mol_type = other RNA
actggacgttacaaaatgc

SEQ ID NO: 12087 - RNA, 19 nt, synthetic construct
  source 1..19: mol_type = other RNA
cactggacgttacaaaatg

SEQ ID NO: 12088 - RNA, 19 nt, synthetic construct
  source 1..19: mol_type = other RNA
acactggacgttacaaaat

SEQ ID NO: 12089 - RNA, 19 nt, synthetic construct
  source 1..19: mol_type = other RNA
cacactggacgttacaaaa

SEQ ID NO: 12090 - RNA, 19 nt, synthetic construct
  source 1..19: mol_type = other RNA
ccacactggacgttacaaa

SEQ ID NO: 12091 - RNA, 19 nt, synthetic construct
  source 1..19: mol_type = other RNA
gccacactggacgttacaa

SEQ ID NO: 12092 - RNA, 19 nt, synthetic construct
  source 1..19: mol_type = other RNA
cgccacactggacgttaca

SEQ ID NO: 12093 - RNA, 19 nt, synthetic construct
  source 1..19: mol_type = other RNA
acgccacactggacgttac

SEQ ID NO: 12094 - RNA, 19 nt, synthetic construct
  source 1..19: mol_type = other RNA
aacgccacactggacgtta

SEQ ID NO: 12095 - RNA, 19 nt, synthetic construct
  source 1..19: mol_type = other RNA
caacgccacactggacgtt

SEQ ID NO: 12096 - RNA, 19 nt, synthetic construct
  source 1..19: mol_type = other RNA
tcaacgccacactggacgt

SEQ ID NO: 12097 - RNA, 19 nt, synthetic construct
  source 1..19: mol_type = other RNA
ttcaacgccacactggacg

SEQ ID NO: 12098 - RNA, 19 nt, synthetic construct
  source 1..19: mol_type = other RNA
attcaacgccacactggac

SEQ ID NO: 12099 - RNA, 19 nt, synthetic construct
  source 1..19: mol_type = other RNA
tattcaacgccacactgga

SEQ ID NO: 12100 - RNA, 19 nt, synthetic construct
  source 1..19: mol_type = other RNA
ctattcaacgccacactgg

SEQ ID NO: 12101 - RNA, 19 nt, synthetic construct
  source 1..19: mol_type = other RNA
tctattcaacgccacactg

SEQ ID NO: 12102 - RNA, 19 nt, synthetic construct
  source 1..19: mol_type = other RNA
atctattcaacgccacact

SEQ ID NO: 12103 - RNA, 19 nt, synthetic construct
  source 1..19: mol_type = other RNA
catctattcaacgccacac

SEQ ID NO: 12104 - RNA, 19 nt, synthetic construct
  source 1..19: mol_type = other RNA
acatctattcaacgccaca

SEQ ID NO: 12105 - RNA, 19 nt, synthetic construct
  source 1..19: mol_type = other RNA
cacatctattcaacgccac

SEQ ID NO: 12106 - RNA, 19 nt, synthetic construct
  source 1..19: mol_type = other RNA
acacatctattcaacgcca

SEQ ID NO: 12107 - RNA, 19 nt, synthetic construct
  source 1..19: mol_type = other RNA
tacacatctattcaacgcc

SEQ ID NO: 12108 - RNA, 19 nt, synthetic construct
  source 1..19: mol_type = other RNA
atacacatctattcaacgc

SEQ ID NO: 12109 - RNA, 19 nt, synthetic construct
  source 1..19: mol_type = other RNA
aatacacatctattcaacg

SEQ ID NO: 12110 - RNA, 19 nt, synthetic construct
  source 1..19: mol_type = other RNA
aaatacacatctattcaac

SEQ ID NO: 12111 - RNA, 19 nt, synthetic construct
  source 1..19: mol_type = other RNA
gaaatacacatctattcaa

SEQ ID NO: 12112 - RNA, 19 nt, synthetic construct
  source 1..19: mol_type = other RNA
ggaaatacacatctattca

SEQ ID NO: 12113 - RNA, 19 nt, synthetic construct
  source 1..19: mol_type = other RNA
aggaaatacacatctattc

SEQ ID NO: 12114 - RNA, 19 nt, synthetic construct
  source 1..19: mol_type = other RNA
gaggaaatacacatctatt

SEQ ID NO: 12115 - RNA, 19 nt, synthetic construct
  source 1..19: mol_type = other RNA
ggaggaaatacacatctat

SEQ ID NO: 12116 - RNA, 19 nt, synthetic construct
  source 1..19: mol_type = other RNA
gggaggaaatacacatcta

SEQ ID NO: 12117 - RNA, 19 nt, synthetic construct
  source 1..19: mol_type = other RNA
ggggaggaaatacacatct

SEQ ID NO: 12118 - RNA, 19 nt, synthetic construct
  source 1..19: mol_type = other RNA
aggggaggaaatacacatc

SEQ ID NO: 12119 - RNA, 19 nt, synthetic construct
  source 1..19: mol_type = other RNA
caggggaggaaatacacat

SEQ ID NO: 12120 - RNA, 19 nt, synthetic construct
  source 1..19: mol_type = other RNA
gcaggggaggaaatacaca

SEQ ID NO: 12121 - RNA, 19 nt, synthetic construct
  source 1..19: mol_type = other RNA
tgcaggggaggaaatacac

SEQ ID NO: 12122 - RNA, 19 nt, synthetic construct
  source 1..19: mol_type = other RNA
ctgcaggggaggaaataca

SEQ ID NO: 12123 - RNA, 19 nt, synthetic construct
  source 1..19: mol_type = other RNA
tctgcaggggaggaaatac

SEQ ID NO: 12124 - RNA, 19 nt, synthetic construct
  source 1..19: mol_type = other RNA
ttctgcaggggaggaaata

SEQ ID NO: 12125 - RNA, 19 nt, synthetic construct
  source 1..19: mol_type = other RNA
tttctgcaggggaggaaat

SEQ ID NO: 12126 - RNA, 19 nt, synthetic construct
  source 1..19: mol_type = other RNA
ttttctgcaggggaggaaa

SEQ ID NO: 12127 - RNA, 19 nt, synthetic construct
  source 1..19: mol_type = other RNA
attttctgcaggggaggaa

SEQ ID NO: 12128 - RNA, 19 nt, synthetic construct
  source 1..19: mol_type = other RNA
tattttctgcaggggagga

SEQ ID NO: 12129 - RNA, 19 nt, synthetic construct
  source 1..19: mol_type = other RNA
ttattttctgcaggggagg

SEQ ID NO: 12130 - RNA, 19 nt, synthetic construct
  source 1..19: mol_type = other RNA
cttattttctgcaggggag

SEQ ID NO: 12131 - RNA, 19 nt, synthetic construct
  source 1..19: mol_type = other RNA
gcttattttctgcagggga

SEQ ID NO: 12132 - RNA, 19 nt, synthetic construct
  source 1..19: mol_type = other RNA
tgcttattttctgcagggg

SEQ ID NO: 12133 - RNA, 19 nt, synthetic construct
  source 1..19: mol_type = other RNA
gtgcttattttctgcaggg

SEQ ID NO: 12134 - RNA, 19 nt, synthetic construct
  source 1..19: mol_type = other RNA
tgtgcttattttctgcagg

SEQ ID NO: 12135 - RNA, 19 nt, synthetic construct
  source 1..19: mol_type = other RNA
ctgtgcttattttctgcag

SEQ ID NO: 12136 - RNA, 19 nt, synthetic construct
  source 1..19: mol_type = other RNA
tctgtgcttattttctgca

SEQ ID NO: 12137 - RNA, 19 nt, synthetic construct
  source 1..19: mol_type = other RNA
ttctgtgcttattttctgc

SEQ ID NO: 12138 - RNA, 19 nt, synthetic construct
  source 1..19: mol_type = other RNA
tttctgtgcttattttctg

SEQ ID NO: 12139 - RNA, 19 nt, synthetic construct
  source 1..19: mol_type = other RNA
ttttctgtgcttattttct

SEQ ID NO: 12140 - RNA, 19 nt, synthetic construct
  source 1..19: mol_type = other RNA
attttctgtgcttattttc

SEQ ID NO: 12141 - RNA, 19 nt, synthetic construct
  source 1..19: mol_type = other RNA
aattttctgtgcttatttt

SEQ ID NO: 12142 - RNA, 19 nt, synthetic construct
  source 1..19: mol_type = other RNA
taattttctgtgcttattt

SEQ ID NO: 12143 - RNA, 19 nt, synthetic construct
  source 1..19: mol_type = other RNA
ataattttctgtgcttatt

SEQ ID NO: 12144 - RNA, 19 nt, synthetic construct
  source 1..19: mol_type = other RNA
tataattttctgtgcttat

SEQ ID NO: 12145 - RNA, 19 nt, synthetic construct
  source 1..19: mol_type = other RNA
ttataattttctgtgctta

SEQ ID NO: 12146 - RNA, 19 nt, synthetic construct
  source 1..19: mol_type = other RNA
attataattttctgtgctt

SEQ ID NO: 12147 - RNA, 19 nt, synthetic construct
  source 1..19: mol_type = other RNA
cattataattttctgtgct

SEQ ID NO: 12148 - RNA, 19 nt, synthetic construct
  source 1..19: mol_type = other RNA
acattataattttctgtgc

SEQ ID NO: 12149 - RNA, 19 nt, synthetic construct
  source 1..19: mol_type = other RNA
tacattataattttctgtg

SEQ ID NO: 12150 - RNA, 19 nt, synthetic construct
  source 1..19: mol_type = other RNA
ctacattataattttctgt

SEQ ID NO: 12151 - RNA, 19 nt, synthetic construct
  source 1..19: mol_type = other RNA
cctacattataattttctg

SEQ ID NO: 12152 - RNA, 19 nt, synthetic construct
  source 1..19: mol_type = other RNA
acctacattataattttct

SEQ ID NO: 12153 - RNA, 19 nt, synthetic construct
  source 1..19: mol_type = other RNA
cacctacattataattttc

SEQ ID NO: 12154 - RNA, 19 nt, synthetic construct
  source 1..19: mol_type = other RNA
tcacctacattataatttt

SEQ ID NO: 12155 - RNA, 19 nt, synthetic construct
  source 1..19: mol_type = other RNA
atcacctacattataattt

SEQ ID NO: 12156 - RNA, 19 nt, synthetic construct
  source 1..19: mol_type = other RNA
gatcacctacattataatt

SEQ ID NO: 12157 - RNA, 19 nt, synthetic construct
  source 1..19: mol_type = other RNA
cgatcacctacattataat

SEQ ID NO: 12158 - RNA, 19 nt, synthetic construct
  source 1..19: mol_type = other RNA
ccgatcacctacattataa

SEQ ID NO: 12159 - RNA, 19 nt, synthetic construct
  source 1..19: mol_type = other RNA
tccgatcacctacattata

SEQ ID NO: 12160 - RNA, 19 nt, synthetic construct
  source 1..19: mol_type = other RNA
ctccgatcacctacattat

SEQ ID NO: 12161 - RNA, 19 nt, synthetic construct
  source 1..19: mol_type = other RNA
gctccgatcacctacatta

SEQ ID NO: 12162 - RNA, 19 nt, synthetic construct
  source 1..19: mol_type = other RNA
agctccgatcacctacatt

SEQ ID NO: 12163 - RNA, 19 nt, synthetic construct
  source 1..19: mol_type = other RNA
gagctccgatcacctacat

SEQ ID NO: 12164 - RNA, 19 nt, synthetic construct
  source 1..19: mol_type = other RNA
agagctccgatcacctaca

SEQ ID NO: 12165 - RNA, 19 nt, synthetic construct
  source 1..19: mol_type = other RNA
aagagctccgatcacctac

SEQ ID NO: 12166 - RNA, 19 nt, synthetic construct
  source 1..19: mol_type = other RNA
aaagagctccgatcaccta

SEQ ID NO: 12167 - RNA, 19 nt, synthetic construct
  source 1..19: mol_type = other RNA
gaaagagctccgatcacct

SEQ ID NO: 12168 - RNA, 19 nt, synthetic construct
  source 1..19: mol_type = other RNA
ggaaagagctccgatcacc

SEQ ID NO: 12169 - RNA, 19 nt, synthetic construct
  source 1..19: mol_type = other RNA
aggaaagagctccgatcac

SEQ ID NO: 12170 - RNA, 19 nt, synthetic construct
  source 1..19: mol_type = other RNA
aaggaaagagctccgatca

SEQ ID NO: 12171 - RNA, 19 nt, synthetic construct
  source 1..19: mol_type = other RNA
aaaggaaagagctccgatc

SEQ ID NO: 12172 - RNA, 19 nt, synthetic construct
  source 1..19: mol_type = other RNA
caaaggaaagagctccgat

SEQ ID NO: 12173 - RNA, 19 nt, synthetic construct
  source 1..19: mol_type = other RNA
tcaaaggaaagagctccga

SEQ ID NO: 12174 - RNA, 19 nt, synthetic construct
  source 1..19: mol_type = other RNA
atcaaaggaaagagctccg

SEQ ID NO: 12175 - RNA, 19 nt, synthetic construct
  source 1..19: mol_type = other RNA
tatcaaaggaaagagctcc

SEQ ID NO: 12176 - RNA, 19 nt, synthetic construct
  source 1..19: mol_type = other RNA
ctatcaaaggaaagagctc

SEQ ID NO: 12177 - RNA, 19 nt, synthetic construct
  source 1..19: mol_type = other RNA
tctatcaaaggaaagagct

SEQ ID NO: 12178 - RNA, 19 nt, synthetic construct
  source 1..19: mol_type = other RNA
ctctatcaaaggaaagagc

SEQ ID NO: 12179 - RNA, 19 nt, synthetic construct
  source 1..19: mol_type = other RNA
tctctatcaaaggaaagag

SEQ ID NO: 12180 - RNA, 19 nt, synthetic construct
  source 1..19: mol_type = other RNA
ctctctatcaaaggaaaga

SEQ ID NO: 12181 - RNA, 19 nt, synthetic construct
  source 1..19: mol_type = other RNA
tctctctatcaaaggaaag

SEQ ID NO: 12182 - RNA, 19 nt, synthetic construct
  source 1..19: mol_type = other RNA
ttctctctatcaaaggaaa

SEQ ID NO: 12183 - RNA, 19 nt, synthetic construct
  source 1..19: mol_type = other RNA
gttctctctatcaaaggaa

SEQ ID NO: 12184 - RNA, 19 nt, synthetic construct
  source 1..19: mol_type = other RNA
tgttctctctatcaaagga

SEQ ID NO: 12185 - RNA, 19 nt, synthetic construct
  source 1..19: mol_type = other RNA
ctgttctctctatcaaagg

SEQ ID NO: 12186 - RNA, 19 nt, synthetic construct
  source 1..19: mol_type = other RNA
gctgttctctctatcaaag

SEQ ID NO: 12187 - RNA, 19 nt, synthetic construct
  source 1..19: mol_type = other RNA
ggctgttctctctatcaaa

SEQ ID NO: 12188 - RNA, 19 nt, synthetic construct
  source 1..19: mol_type = other RNA
gggctgttctctctatcaa

SEQ ID NO: 12189 - RNA, 19 nt, synthetic construct
  source 1..19: mol_type = other RNA
ggggctgttctctctatca

SEQ ID NO: 12190 - RNA, 19 nt, synthetic construct
  source 1..19: mol_type = other RNA
tggggctgttctctctatc

SEQ ID NO: 12191 - RNA, 19 nt, synthetic construct
  source 1..19: mol_type = other RNA
ttggggctgttctctctat

SEQ ID NO: 12192 - RNA, 19 nt, synthetic construct
  source 1..19: mol_type = other RNA
attggggctgttctctcta

SEQ ID NO: 12193 - RNA, 19 nt, synthetic construct
  source 1..19: mol_type = other RNA
cattggggctgttctctct

SEQ ID NO: 12194 - RNA, 19 nt, synthetic construct
  source 1..19: mol_type = other RNA
tcattggggctgttctctc

SEQ ID NO: 12195 - RNA, 19 nt, synthetic construct
  source 1..19: mol_type = other RNA
atcattggggctgttctct

SEQ ID NO: 12196 - RNA, 19 nt, synthetic construct
  source 1..19: mol_type = other RNA
gatcattggggctgttctc

SEQ ID NO: 12197 - RNA, 19 nt, synthetic construct
  source 1..19: mol_type = other RNA
ggatcattggggctgttct

SEQ ID NO: 12198 - RNA, 19 nt, synthetic construct
  source 1..19: mol_type = other RNA
aggatcattggggctgttc

SEQ ID NO: 12199 - RNA, 19 nt, synthetic construct
  source 1..19: mol_type = other RNA
caggatcattggggctgtt

SEQ ID NO: 12200 - RNA, 19 nt, synthetic construct
  source 1..19: mol_type = other RNA
ccaggatcattggggctgt

SEQ ID NO: 12201 - RNA, 19 nt, synthetic construct
  source 1..19: mol_type = other RNA
gccaggatcattggggctg

SEQ ID NO: 12202 - RNA, 19 nt, synthetic construct
  source 1..19: mol_type = other RNA
agccaggatcattggggct

SEQ ID NO: 12203 - RNA, 19 nt, synthetic construct
  source 1..19: mol_type = other RNA
aagccaggatcattggggc

SEQ ID NO: 12204 - RNA, 19 nt, synthetic construct
  source 1..19: mol_type = other RNA
aaagccaggatcattgggg

SEQ ID NO: 12205 - RNA, 19 nt, synthetic construct
  source 1..19: mol_type = other RNA
aaaagccaggatcattggg

SEQ ID NO: 12206 - RNA, 19 nt, synthetic construct
  source 1..19: mol_type = other RNA
aaaaagccaggatcattgg

SEQ ID NO: 12207 - RNA, 19 nt, synthetic construct
  source 1..19: mol_type = other RNA
gaaaaagccaggatcattg

SEQ ID NO: 12208 - RNA, 19 nt, synthetic construct
  source 1..19: mol_type = other RNA
tgaaaaagccaggatcatt

SEQ ID NO: 12209 - RNA, 19 nt, synthetic construct
  source 1..19: mol_type = other RNA
gtgaaaaagccaggatcat

SEQ ID NO: 12210 - RNA, 19 nt, synthetic construct
  source 1..19: mol_type = other RNA
agtgaaaaagccaggatca

SEQ ID NO: 12211 - RNA, 19 nt, synthetic construct
  source 1..19: mol_type = other RNA
cagtgaaaaagccaggatc

SEQ ID NO: 12212 - RNA, 19 nt, synthetic construct
  source 1..19: mol_type = other RNA
tcagtgaaaaagccaggat

SEQ ID NO: 12213 - RNA, 19 nt, synthetic construct
  source 1..19: mol_type = other RNA
ttcagtgaaaaagccagga

SEQ ID NO: 12214 - RNA, 19 nt, synthetic construct
  source 1..19: mol_type = other RNA
gttcagtgaaaaagccagg

SEQ ID NO: 12215 - RNA, 19 nt, synthetic construct
  source 1..19: mol_type = other RNA
cgttcagtgaaaaagccag

SEQ ID NO: 12216 - RNA, 19 nt, synthetic construct
  source 1..19: mol_type = other RNA
acgttcagtgaaaaagcca

SEQ ID NO: 12217 - RNA, 19 nt, synthetic construct
  source 1..19: mol_type = other RNA
tacgttcagtgaaaaagcc

SEQ ID NO: 12218 - RNA, 19 nt, synthetic construct
  source 1..19: mol_type = other RNA
atacgttcagtgaaaaagc

SEQ ID NO: 12219 - RNA, 19 nt, synthetic construct
  source 1..19: mol_type = other RNA
gatacgttcagtgaaaaag

SEQ ID NO: 12220 - RNA, 19 nt, synthetic construct
  source 1..19: mol_type = other RNA
tgatacgttcagtgaaaaa

SEQ ID NO: 12221 - RNA, 19 nt, synthetic construct
  source 1..19: mol_type = other RNA
ctgatacgttcagtgaaaa

SEQ ID NO: 12222 - RNA, 19 nt, synthetic construct
  source 1..19: mol_type = other RNA
tctgatacgttcagtgaaa

SEQ ID NO: 12223 - RNA, 19 nt, synthetic construct
  source 1..19: mol_type = other RNA
ttctgatacgttcagtgaa

SEQ ID NO: 12224 - RNA, 19 nt, synthetic construct
  source 1..19: mol_type = other RNA
attctgatacgttcagtga

SEQ ID NO: 12225 - RNA, 19 nt, synthetic construct
  source 1..19: mol_type = other RNA
tattctgatacgttcagtg

SEQ ID NO: 12226 - RNA, 19 nt, synthetic construct
  source 1..19: mol_type = other RNA
gtattctgatacgttcagt

SEQ ID NO: 12227 - RNA, 19 nt, synthetic construct
  source 1..19: mol_type = other RNA
tgtattctgatacgttcag

SEQ ID NO: 12228 - RNA, 19 nt, synthetic construct
  source 1..19: mol_type = other RNA
atgtattctgatacgttca

SEQ ID NO: 12229 - RNA, 19 nt, synthetic construct
  source 1..19: mol_type = other RNA
catgtattctgatacgttc

SEQ ID NO: 12230 - RNA, 19 nt, synthetic construct
  source 1..19: mol_type = other RNA
ccatgtattctgatacgtt

SEQ ID NO: 12231 - RNA, 19 nt, synthetic construct
  source 1..19: mol_type = other RNA
tccatgtattctgatacgt

SEQ ID NO: 12232 - RNA, 19 nt, synthetic construct
  source 1..19: mol_type = other RNA
atccatgtattctgatacg

SEQ ID NO: 12233 - RNA, 19 nt, synthetic construct
  source 1..19: mol_type = other RNA
catccatgtattctgatac

SEQ ID NO: 12234 - RNA, 19 nt, synthetic construct
  source 1..19: mol_type = other RNA
tcatccatgtattctgata

SEQ ID NO: 12235 - RNA, 19 nt, synthetic construct
  source 1..19: mol_type = other RNA
ttcatccatgtattctgat

SEQ ID NO: 12236 - RNA, 19 nt, synthetic construct
  source 1..19: mol_type = other RNA
attcatccatgtattctga

SEQ ID NO: 12237 - RNA, 19 nt, synthetic construct
  source 1..19: mol_type = other RNA
aattcatccatgtattctg

SEQ ID NO: 12238 - RNA, 19 nt, synthetic construct
  source 1..19: mol_type = other RNA
caattcatccatgtattct

SEQ ID NO: 12239 - RNA, 19 nt, synthetic construct
  source 1..19: mol_type = other RNA
ccaattcatccatgtattc

SEQ ID NO: 12240 - RNA, 19 nt, synthetic construct
  source 1..19: mol_type = other RNA
cccaattcatccatgtatt

SEQ ID NO: 12241 - RNA, 19 nt, synthetic construct
  source 1..19: mol_type = other RNA
ccccaattcatccatgtat

SEQ ID NO: 12242 - RNA, 19 nt, synthetic construct
  source 1..19: mol_type = other RNA
accccaattcatccatgta

SEQ ID NO: 12243 - RNA, 19 nt, synthetic construct
  source 1..19: mol_type = other RNA
taccccaattcatccatgt

SEQ ID NO: 12244 - RNA, 19 nt, synthetic construct
  source 1..19: mol_type = other RNA
ttaccccaattcatccatg

SEQ ID NO: 12245 - RNA, 19 nt, synthetic construct
  source 1..19: mol_type = other RNA
tttaccccaattcatccat

SEQ ID NO: 12246 - RNA, 19 nt, synthetic construct
  source 1..19: mol_type = other RNA
atttaccccaattcatcca

SEQ ID NO: 12247 - RNA, 19 nt, synthetic construct
  source 1..19: mol_type = other RNA
tatttaccccaattcatcc

SEQ ID NO: 12248 - RNA, 19 nt, synthetic construct
  source 1..19: mol_type = other RNA
ttatttaccccaattcatc

SEQ ID NO: 12249 - RNA, 19 nt, synthetic construct
  source 1..19: mol_type = other RNA
cttatttaccccaattcat

SEQ ID NO: 12250 - RNA, 19 nt, synthetic construct
  source 1..19: mol_type = other RNA
ccttatttaccccaattca

SEQ ID NO: 12251 - RNA, 19 nt, synthetic construct
  source 1..19: mol_type = other RNA
accttatttaccccaattc

SEQ ID NO: 12252 - RNA, 19 nt, synthetic construct
  source 1..19: mol_type = other RNA
aaccttatttaccccaatt

SEQ ID NO: 12253 - RNA, 19 nt, synthetic construct
  source 1..19: mol_type = other RNA
aaaccttatttaccccaat

SEQ ID NO: 12254 - RNA, 19 nt, synthetic construct
  source 1..19: mol_type = other RNA
aaaaccttatttaccccaa

SEQ ID NO: 12255 - RNA, 19 nt, synthetic construct
  source 1..19: mol_type = other RNA
taaaaccttatttacccca

SEQ ID NO: 12256 - RNA, 19 nt, synthetic construct
  source 1..19: mol_type = other RNA
ttaaaaccttatttacccc

SEQ ID NO: 12257 - RNA, 19 nt, synthetic construct
  source 1..19: mol_type = other RNA
attaaaaccttatttaccc

SEQ ID NO: 12258 - RNA, 19 nt, synthetic construct
  source 1..19: mol_type = other RNA
aattaaaaccttatttacc

SEQ ID NO: 12259 - RNA, 19 nt, synthetic construct
  source 1..19: mol_type = other RNA
gaattaaaaccttatttac

SEQ ID NO: 12260 - RNA, 19 nt, synthetic construct
  source 1..19: mol_type = other RNA
tgaattaaaaccttattta

SEQ ID NO: 12261 - RNA, 19 nt, synthetic construct
  source 1..19: mol_type = other RNA
ctgaattaaaaccttattt

SEQ ID NO: 12262 - RNA, 19 nt, synthetic construct
  source 1..19: mol_type = other RNA
tctgaattaaaaccttatt

SEQ ID NO: 12263 - RNA, 19 nt, synthetic construct
  source 1..19: mol_type = other RNA
atctgaattaaaaccttat

SEQ ID NO: 12264 - RNA, 19 nt, synthetic construct
  source 1..19: mol_type = other RNA
gatctgaattaaaacctta

SEQ ID NO: 12265 - RNA, 19 nt, synthetic construct
  source 1..19: mol_type = other RNA
agatctgaattaaaacctt

SEQ ID NO: 12266 - RNA, 19 nt, synthetic construct
  source 1..19: mol_type = other RNA
tagatctgaattaaaacct

SEQ ID NO: 12267 - RNA, 19 nt, synthetic construct
  source 1..19: mol_type = other RNA
ctagatctgaattaaaacc

SEQ ID NO: 12268 - RNA, 19 nt, synthetic construct
  source 1..19: mol_type = other RNA
tctagatctgaattaaaac

SEQ ID NO: 12269 - RNA, 19 nt, synthetic construct
  source 1..19: mol_type = other RNA
ttctagatctgaattaaaa

SEQ ID NO: 12270 - RNA, 19 nt, synthetic construct
  source 1..19: mol_type = other RNA
cttctagatctgaattaaa

SEQ ID NO: 12271 - RNA, 19 nt, synthetic construct
  source 1..19: mol_type = other RNA
tcttctagatctgaattaa

SEQ ID NO: 12272 - RNA, 19 nt, synthetic construct
  source 1..19: mol_type = other RNA
ttcttctagatctgaatta

SEQ ID NO: 12273 - RNA, 19 nt, synthetic construct
  source 1..19: mol_type = other RNA
tttcttctagatctgaatt

SEQ ID NO: 12274 - RNA, 19 nt, synthetic construct
  source 1..19: mol_type = other RNA
ctttcttctagatctgaat

SEQ ID NO: 12275 - RNA, 19 nt, synthetic construct
  source 1..19: mol_type = other RNA
actttcttctagatctgaa

SEQ ID NO: 12276 - RNA, 19 nt, synthetic construct
  source 1..19: mol_type = other RNA
tactttcttctagatctga

SEQ ID NO: 12277 - RNA, 19 nt, synthetic construct
  source 1..19: mol_type = other RNA
atactttcttctagatctg

SEQ ID NO: 12278 - RNA, 19 nt, synthetic construct
  source 1..19: mol_type = other RNA
aatactttcttctagatct

SEQ ID NO: 12279 - RNA, 19 nt, synthetic construct
  source 1..19: mol_type = other RNA
caatactttcttctagatc

SEQ ID NO: 12280 - RNA, 19 nt, synthetic construct
  source 1..19: mol_type = other RNA
acaatactttcttctagat

SEQ ID NO: 12281 - RNA, 19 nt, synthetic construct
  source 1..19: mol_type = other RNA
tacaatactttcttctaga

SEQ ID NO: 12282 - RNA, 19 nt, synthetic construct
  source 1..19: mol_type = other RNA
gtacaatactttcttctag

SEQ ID NO: 12283 - RNA, 19 nt, synthetic construct
  source 1..19: mol_type = other RNA
cgtacaatactttcttcta

SEQ ID NO: 12284 - RNA, 19 nt, synthetic construct
  source 1..19: mol_type = other RNA
acgtacaatactttcttct

SEQ ID NO: 12285 - RNA, 19 nt, synthetic construct
  source 1..19: mol_type = other RNA
aacgtacaatactttcttc

SEQ ID NO: 12286 - RNA, 19 nt, synthetic construct
  source 1..19: mol_type = other RNA
aaacgtacaatactttctt

SEQ ID NO: 12287 - RNA, 19 nt, synthetic construct
  source 1..19: mol_type = other RNA
caaacgtacaatactttct

SEQ ID NO: 12288 - RNA, 19 nt, synthetic construct
  source 1..19: mol_type = other RNA
tcaaacgtacaatactttc

SEQ ID NO: 12289 - RNA, 19 nt, synthetic construct
  source 1..19: mol_type = other RNA
ttcaaacgtacaatacttt

SEQ ID NO: 12290 - RNA, 19 nt, synthetic construct
  source 1..19: mol_type = other RNA
attcaaacgtacaatactt

SEQ ID NO: 12291 - RNA, 19 nt, synthetic construct
  source 1..19: mol_type = other RNA
cattcaaacgtacaatact

SEQ ID NO: 12292 - RNA, 19 nt, synthetic construct
  source 1..19: mol_type = other RNA
gcattcaaacgtacaatac

SEQ ID NO: 12293 - RNA, 19 nt, synthetic construct
  source 1..19: mol_type = other RNA
tgcattcaaacgtacaata

SEQ ID NO: 12294 - RNA, 19 nt, synthetic construct
  source 1..19: mol_type = other RNA
ctgcattcaaacgtacaat

SEQ ID NO: 12295 - RNA, 19 nt, synthetic construct
  source 1..19: mol_type = other RNA
tctgcattcaaacgtacaa

SEQ ID NO: 12296 - RNA, 19 nt, synthetic construct
  source 1..19: mol_type = other RNA
atctgcattcaaacgtaca

SEQ ID NO: 12297 - RNA, 19 nt, synthetic construct
  source 1..19: mol_type = other RNA
aatctgcattcaaacgtac

SEQ ID NO: 12298 - RNA, 19 nt, synthetic construct
  source 1..19: mol_type = other RNA
aaatctgcattcaaacgta

SEQ ID NO: 12299 - RNA, 19 nt, synthetic construct
  source 1..19: mol_type = other RNA
aaaatctgcattcaaacgt

SEQ ID NO: 12300 - RNA, 19 nt, synthetic construct
  source 1..19: mol_type = other RNA
aaaaatctgcattcaaacg

SEQ ID NO: 12301 - RNA, 19 nt, synthetic construct
  source 1..19: mol_type = other RNA
taaaaatctgcattcaaac

SEQ ID NO: 12302 - RNA, 19 nt, synthetic construct
  source 1..19: mol_type = other RNA
ataaaaatctgcattcaaa

SEQ ID NO: 12303 - RNA, 19 nt, synthetic construct
  source 1..19: mol_type = other RNA
gataaaaatctgcattcaa

SEQ ID NO: 12304 - RNA, 19 nt, synthetic construct
  source 1..19: mol_type = other RNA
ggataaaaatctgcattca

SEQ ID NO: 12305 - RNA, 19 nt, synthetic construct
  source 1..19: mol_type = other RNA
tggataaaaatctgcattc

SEQ ID NO: 12306 - RNA, 19 nt, synthetic construct
  source 1..19: mol_type = other RNA
gtggataaaaatctgcatt

SEQ ID NO: 12307 - RNA, 19 nt, synthetic construct
  source 1..19: mol_type = other RNA
tgtggataaaaatctgcat

SEQ ID NO: 12308 - RNA, 19 nt, synthetic construct
  source 1..19: mol_type = other RNA
ctgtggataaaaatctgca

SEQ ID NO: 12309 - RNA, 19 nt, synthetic construct
  source 1..19: mol_type = other RNA
tctgtggataaaaatctgc

SEQ ID NO: 12310 - RNA, 19 nt, synthetic construct
  source 1..19: mol_type = other RNA
atctgtggataaaaatctg

SEQ ID NO: 12311 - RNA, 19 nt, synthetic construct
  source 1..19: mol_type = other RNA
tatctgtggataaaaatct

SEQ ID NO: 12312 - RNA, 19 nt, synthetic construct
  source 1..19: mol_type = other RNA
ctatctgtggataaaaatc

SEQ ID NO: 12313 - RNA, 19 nt, synthetic construct
  source 1..19: mol_type = other RNA
actatctgtggataaaaat

SEQ ID NO: 12314 - RNA, 19 nt, synthetic construct
  source 1..19: mol_type = other RNA
aactatctgtggataaaaa

SEQ ID NO: 12315 - RNA, 19 nt, synthetic construct
  source 1..19: mol_type = other RNA
caactatctgtggataaaa

SEQ ID NO: 12316 - RNA, 19 nt, synthetic construct
  source 1..19: mol_type = other RNA
acaactatctgtggataaa

SEQ ID NO: 12317 - RNA, 19 nt, synthetic construct
  source 1..19: mol_type = other RNA
tacaactatctgtggataa

SEQ ID NO: 12318 - RNA, 19 nt, synthetic construct
  source 1..19: mol_type = other RNA
ctacaactatctgtggata

SEQ ID NO: 12319 - RNA, 19 nt, synthetic construct
  source 1..19: mol_type = other RNA
actacaactatctgtggat

SEQ ID NO: 12320 - RNA, 19 nt, synthetic construct
  source 1..19: mol_type = other RNA
cactacaactatctgtgga

SEQ ID NO: 12321 - RNA, 19 nt, synthetic construct
  source 1..19: mol_type = other RNA
acactacaactatctgtgg

SEQ ID NO: 12322 - RNA, 19 nt, synthetic construct
  source 1..19: mol_type = other RNA
aacactacaactatctgtg

SEQ ID NO: 12323 - RNA, 19 nt, synthetic construct
  source 1..19: mol_type = other RNA
aaacactacaactatctgt

SEQ ID NO: 12324 - RNA, 19 nt, synthetic construct
  source 1..19: mol_type = other RNA
taaacactacaactatctg

SEQ ID NO: 12325 - RNA, 19 nt, synthetic construct
  source 1..19: mol_type = other RNA
ctaaacactacaactatct

SEQ ID NO: 12326 - RNA, 19 nt, synthetic construct
  source 1..19: mol_type = other RNA
tctaaacactacaactatc

SEQ ID NO: 12327 - RNA, 19 nt, synthetic construct
  source 1..19: mol_type = other RNA
gtctaaacactacaactat

SEQ ID NO: 12328 - RNA, 19 nt, synthetic construct
  source 1..19: mol_type = other RNA
tgtctaaacactacaacta

SEQ ID NO: 12329 - RNA, 19 nt, synthetic construct
  source 1..19: mol_type = other RNA
atgtctaaacactacaact

SEQ ID NO: 12330 - RNA, 19 nt, synthetic construct
  source 1..19: mol_type = other RNA
catgtctaaacactacaac

SEQ ID NO: 12331 - RNA, 19 nt, synthetic construct
  source 1..19: mol_type = other RNA
tcatgtctaaacactacaa

SEQ ID NO: 12332 - RNA, 19 nt, synthetic construct
  source 1..19: mol_type = other RNA
gtcatgtctaaacactaca

SEQ ID NO: 12333 - RNA, 19 nt, synthetic construct
  source 1..19: mol_type = other RNA
tgtcatgtctaaacactac

SEQ ID NO: 12334 - RNA, 19 nt, synthetic construct
  source 1..19: mol_type = other RNA
ctgtcatgtctaaacacta

SEQ ID NO: 12335 - RNA, 19 nt, synthetic construct
  source 1..19: mol_type = other RNA
cctgtcatgtctaaacact

SEQ ID NO: 12336 - RNA, 19 nt, synthetic construct
  source 1..19: mol_type = other RNA
tcctgtcatgtctaaacac

SEQ ID NO: 12337 - RNA, 19 nt, synthetic construct
  source 1..19: mol_type = other RNA
gtcctgtcatgtctaaaca

SEQ ID NO: 12338 - RNA, 19 nt, synthetic construct
  source 1..19: mol_type = other RNA
ggtcctgtcatgtctaaac

SEQ ID NO: 12339 - RNA, 19 nt, synthetic construct
  source 1..19: mol_type = other RNA
aggtcctgtcatgtctaaa

SEQ ID NO: 12340 - RNA, 19 nt, synthetic construct
  source 1..19: mol_type = other RNA
taggtcctgtcatgtctaa

SEQ ID NO: 12341 - RNA, 19 nt, synthetic construct
  source 1..19: mol_type = other RNA
ataggtcctgtcatgtcta

SEQ ID NO: 12342 - RNA, 19 nt, synthetic construct
  source 1..19: mol_type = other RNA
gataggtcctgtcatgtct

SEQ ID NO: 12343 - RNA, 19 nt, synthetic construct
  source 1..19: mol_type = other RNA
cgataggtcctgtcatgtc

SEQ ID NO: 12344 - RNA, 19 nt, synthetic construct
  source 1..19: mol_type = other RNA
acgataggtcctgtcatgt

SEQ ID NO: 12345 - RNA, 19 nt, synthetic construct
  source 1..19: mol_type = other RNA
aacgataggtcctgtcatg

SEQ ID NO: 12346 - RNA, 19 nt, synthetic construct
  source 1..19: mol_type = other RNA
caacgataggtcctgtcat

SEQ ID NO: 12347 - RNA, 19 nt, synthetic construct
  source 1..19: mol_type = other RNA
tcaacgataggtcctgtca

SEQ ID NO: 12348 - RNA, 19 nt, synthetic construct
  source 1..19: mol_type = other RNA
ctcaacgataggtcctgtc

SEQ ID NO: 12349 - RNA, 19 nt, synthetic construct
  source 1..19: mol_type = other RNA
cctcaacgataggtcctgt

SEQ ID NO: 12350 - RNA, 19 nt, synthetic construct
  source 1..19: mol_type = other RNA
acctcaacgataggtcctg

SEQ ID NO: 12351 - RNA, 19 nt, synthetic construct
  source 1..19: mol_type = other RNA
aacctcaacgataggtcct

SEQ ID NO: 12352 - RNA, 19 nt, synthetic construct
  source 1..19: mol_type = other RNA
aaacctcaacgataggtcc

SEQ ID NO: 12353 - RNA, 19 nt, synthetic construct
  source 1..19: mol_type = other RNA
gaaacctcaacgataggtc

SEQ ID NO: 12354 - RNA, 19 nt, synthetic construct
  source 1..19: mol_type = other RNA
agaaacctcaacgataggt

SEQ ID NO: 12355 - RNA, 19 nt, synthetic construct
  source 1..19: mol_type = other RNA
tagaaacctcaacgatagg

SEQ ID NO: 12356 - RNA, 19 nt, synthetic construct
  source 1..19: mol_type = other RNA
ttagaaacctcaacgatag

SEQ ID NO: 12357 - RNA, 19 nt, synthetic construct
  source 1..19: mol_type = other RNA
cttagaaacctcaacgata

SEQ ID NO: 12358 - RNA, 19 nt, synthetic construct
  source 1..19: mol_type = other RNA
tcttagaaacctcaacgat

SEQ ID NO: 12359 - RNA, 19 nt, synthetic construct
  source 1..19: mol_type = other RNA
gtcttagaaacctcaacga

SEQ ID NO: 12360 - RNA, 19 nt, synthetic construct
  source 1..19: mol_type = other RNA
agtcttagaaacctcaacg

SEQ ID NO: 12361 - RNA, 19 nt, synthetic construct
  source 1..19: mol_type = other RNA
aagtcttagaaacctcaac

SEQ ID NO: 12362 - RNA, 19 nt, synthetic construct
  source 1..19: mol_type = other RNA
taagtcttagaaacctcaa

SEQ ID NO: 12363 - RNA, 19 nt, synthetic construct
  source 1..19: mol_type = other RNA
gtaagtcttagaaacctca

SEQ ID NO: 12364 - RNA, 19 nt, synthetic construct
  source 1..19: mol_type = other RNA
agtaagtcttagaaacctc

SEQ ID NO: 12365 - RNA, 19 nt, synthetic construct
  source 1..19: mol_type = other RNA
tagtaagtcttagaaacct

SEQ ID NO: 12366 - RNA, 19 nt, synthetic construct
  source 1..19: mol_type = other RNA
atagtaagtcttagaaacc

SEQ ID NO: 12367 - RNA, 19 nt, synthetic construct
  source 1..19: mol_type = other RNA
catagtaagtcttagaaac

SEQ ID NO: 12368 - RNA, 19 nt, synthetic construct
  source 1..19: mol_type = other RNA
ccatagtaagtcttagaaa

SEQ ID NO: 12369 - RNA, 19 nt, synthetic construct
  source 1..19: mol_type = other RNA
cccatagtaagtcttagaa

SEQ ID NO: 12370 - RNA, 19 nt, synthetic construct
  source 1..19: mol_type = other RNA
gcccatagtaagtcttaga

SEQ ID NO: 12371 - RNA, 19 nt, synthetic construct
  source 1..19: mol_type = other RNA
agcccatagtaagtcttag

SEQ ID NO: 12372 - RNA, 19 nt, synthetic construct
  source 1..19: mol_type = other RNA
cagcccatagtaagtctta

SEQ ID NO: 12373 - RNA, 19 nt, synthetic construct
  source 1..19: mol_type = other RNA
acagcccatagtaagtctt

SEQ ID NO: 12374 - RNA, 19 nt, synthetic construct
  source 1..19: mol_type = other RNA
tacagcccatagtaagtct

SEQ ID NO: 12375 - RNA, 19 nt, synthetic construct
  source 1..19: mol_type = other RNA
ttacagcccatagtaagtc

SEQ ID NO: 12376 - RNA, 19 nt, synthetic construct
  source 1..19: mol_type = other RNA
tttacagcccatagtaagt

SEQ ID NO: 12377 - RNA, 19 nt, synthetic construct
  source 1..19: mol_type = other RNA
gtttacagcccatagtaag

SEQ ID NO: 12378 - RNA, 19 nt, synthetic construct
  source 1..19: mol_type = other RNA
ggtttacagcccatagtaa

SEQ ID NO: 12379 - RNA, 19 nt, synthetic construct
  source 1..19: mol_type = other RNA
aggtttacagcccatagta

SEQ ID NO: 12380 - RNA, 19 nt, synthetic construct
  source 1..19: mol_type = other RNA
caggtttacagcccatagt

SEQ ID NO: 12381 - RNA, 19 nt, synthetic construct
  source 1..19: mol_type = other RNA
acaggtttacagcccatag

SEQ ID NO: 12382 - RNA, 19 nt, synthetic construct
  source 1..19: mol_type = other RNA
aacaggtttacagcccata

SEQ ID NO: 12383 - RNA, 19 nt, synthetic construct
  source 1..19: mol_type = other RNA
aaacaggtttacagcccat

SEQ ID NO: 12384 - RNA, 19 nt, synthetic construct
  source 1..19: mol_type = other RNA
aaaacaggtttacagccca

SEQ ID NO: 12385 - RNA, 19 nt, synthetic construct
  source 1..19: mol_type = other RNA
aaaaacaggtttacagccc

SEQ ID NO: 12386 - RNA, 19 nt, synthetic construct
  source 1..19: mol_type = other RNA
aaaaaacaggtttacagcc

SEQ ID NO: 12387 - RNA, 19 nt, synthetic construct
  source 1..19: mol_type = other RNA
taaaaaacaggtttacagc

SEQ ID NO: 12388 - RNA, 19 nt, synthetic construct
  source 1..19: mol_type = other RNA
ttaaaaaacaggtttacag

SEQ ID NO: 12389 - RNA, 19 nt, synthetic construct
  source 1..19: mol_type = other RNA
tttaaaaaacaggtttaca

SEQ ID NO: 12390 - RNA, 19 nt, synthetic construct
  source 1..19: mol_type = other RNA
ttttaaaaaacaggtttac

SEQ ID NO: 12391 - RNA, 19 nt, synthetic construct
  source 1..19: mol_type = other RNA
gttttaaaaaacaggttta

SEQ ID NO: 12392 - RNA, 19 nt, synthetic construct
  source 1..19: mol_type = other RNA
agttttaaaaaacaggttt

SEQ ID NO: 12393 - RNA, 19 nt, synthetic construct
  source 1..19: mol_type = other RNA
tagttttaaaaaacaggtt

SEQ ID NO: 12394 - RNA, 19 nt, synthetic construct
  source 1..19: mol_type = other RNA
atagttttaaaaaacaggt

SEQ ID NO: 12395 - RNA, 19 nt, synthetic construct
  source 1..19: mol_type = other RNA
aatagttttaaaaaacagg

SEQ ID NO: 12396 - RNA, 19 nt, synthetic construct
  source 1..19: mol_type = other RNA
aaatagttttaaaaaacag

SEQ ID NO: 12397 - RNA, 19 nt, synthetic construct
  source 1..19: mol_type = other RNA
aaaatagttttaaaaaaca

SEQ ID NO: 12398 - RNA, 19 nt, synthetic construct
  source 1..19: mol_type = other RNA
taaaatagttttaaaaaac

SEQ ID NO: 12399 - RNA, 19 nt, synthetic construct
  source 1..19: mol_type = other RNA
ctaaaatagttttaaaaaa

SEQ ID NO: 12400 - RNA, 19 nt, synthetic construct
  source 1..19: mol_type = other RNA
tctaaaatagttttaaaaa

SEQ ID NO: 12401 - RNA, 19 nt, synthetic construct
  source 1..19: mol_type = other RNA
ttctaaaatagttttaaaa

SEQ ID NO: 12402 - RNA, 19 nt, synthetic construct
  source 1..19: mol_type = other RNA
tttctaaaatagttttaaa

SEQ ID NO: 12403 - RNA, 19 nt, synthetic construct
  source 1..19: mol_type = other RNA
gtttctaaaatagttttaa

SEQ ID NO: 12404 - RNA, 19 nt, synthetic construct
  source 1..19: mol_type = other RNA
ggtttctaaaatagtttta

SEQ ID NO: 12405 - RNA, 19 nt, synthetic construct
  source 1..19: mol_type = other RNA
aggtttctaaaatagtttt

SEQ ID NO: 12406 - RNA, 19 nt, synthetic construct
  source 1..19: mol_type = other RNA
caggtttctaaaatagttt

SEQ ID NO: 12407 - RNA, 19 nt, synthetic construct
  source 1..19: mol_type = other RNA
tcaggtttctaaaatagtt

SEQ ID NO: 12408 - RNA, 19 nt, synthetic construct
  source 1..19: mol_type = other RNA
ctcaggtttctaaaatagt

SEQ ID NO: 12409 - RNA, 19 nt, synthetic construct
  source 1..19: mol_type = other RNA
tctcaggtttctaaaatag

SEQ ID NO: 12410 - RNA, 19 nt, synthetic construct
  source 1..19: mol_type = other RNA
gtctcaggtttctaaaata

SEQ ID NO: 12411 - RNA, 19 nt, synthetic construct
  source 1..19: mol_type = other RNA
agtctcaggtttctaaaat

SEQ ID NO: 12412 - RNA, 19 nt, synthetic construct
  source 1..19: mol_type = other RNA
aagtctcaggtttctaaaa

SEQ ID NO: 12413 - RNA, 19 nt, synthetic construct
  source 1..19: mol_type = other RNA
caagtctcaggtttctaaa

SEQ ID NO: 12414 - RNA, 19 nt, synthetic construct
  source 1..19: mol_type = other RNA
gcaagtctcaggtttctaa

SEQ ID NO: 12415 - RNA, 19 nt, synthetic construct
  source 1..19: mol_type = other RNA
ggcaagtctcaggtttcta

SEQ ID NO: 12416 - RNA, 19 nt, synthetic construct
  source 1..19: mol_type = other RNA
cggcaagtctcaggtttct

SEQ ID NO: 12417 - RNA, 19 nt, synthetic construct
  source 1..19: mol_type = other RNA
acggcaagtctcaggtttc

SEQ ID NO: 12418 - RNA, 19 nt, synthetic construct
  source 1..19: mol_type = other RNA
gacggcaagtctcaggttt

SEQ ID NO: 12419 - RNA, 19 nt, synthetic construct
  source 1..19: mol_type = other RNA
agacggcaagtctcaggtt

SEQ ID NO: 12420 - RNA, 19 nt, synthetic construct
  source 1..19: mol_type = other RNA
cagacggcaagtctcaggt

SEQ ID NO: 12421 - RNA, 19 nt, synthetic construct
  source 1..19: mol_type = other RNA
ccagacggcaagtctcagg

SEQ ID NO: 12422 - RNA, 19 nt, synthetic construct
  source 1..19: mol_type = other RNA
gccagacggcaagtctcag

SEQ ID NO: 12423 - RNA, 19 nt, synthetic construct
  source 1..19: mol_type = other RNA
tgccagacggcaagtctca

SEQ ID NO: 12424 - RNA, 19 nt, synthetic construct
  source 1..19: mol_type = other RNA
atgccagacggcaagtctc

SEQ ID NO: 12425 - RNA, 19 nt, synthetic construct
  source 1..19: mol_type = other RNA
aatgccagacggcaagtct

SEQ ID NO: 12426 - RNA, 19 nt, synthetic construct
  source 1..19: mol_type = other RNA
aaatgccagacggcaagtc

SEQ ID NO: 12427 - RNA, 19 nt, synthetic construct
  source 1..19: mol_type = other RNA
aaaatgccagacggcaagt

SEQ ID NO: 12428 - RNA, 19 nt, synthetic construct
  source 1..19: mol_type = other RNA
taaaatgccagacggcaag

SEQ ID NO: 12429 - RNA, 19 nt, synthetic construct
  source 1..19: mol_type = other RNA
ctaaaatgccagacggcaa

SEQ ID NO: 12430 - RNA, 19 nt, synthetic construct
  source 1..19: mol_type = other RNA
actaaaatgccagacggca

SEQ ID NO: 12431 - RNA, 19 nt, synthetic construct
  source 1..19: mol_type = other RNA
aactaaaatgccagacggc

SEQ ID NO: 12432 - RNA, 19 nt, synthetic construct
  source 1..19: mol_type = other RNA
aaactaaaatgccagacgg

SEQ ID NO: 12433 - RNA, 19 nt, synthetic construct
  source 1..19: mol_type = other RNA
taaactaaaatgccagacg

SEQ ID NO: 12434 - RNA, 19 nt, synthetic construct
  source 1..19: mol_type = other RNA
ttaaactaaaatgccagac

SEQ ID NO: 12435 - RNA, 19 nt, synthetic construct
  source 1..19: mol_type = other RNA
attaaactaaaatgccaga

SEQ ID NO: 12436 - RNA, 19 nt, synthetic construct
  source 1..19: mol_type = other RNA
tattaaactaaaatgccag

SEQ ID NO: 12437 - RNA, 19 nt, synthetic construct
  source 1..19: mol_type = other RNA
gtattaaactaaaatgcca

SEQ ID NO: 12438 - RNA, 19 nt, synthetic construct
  source 1..19: mol_type = other RNA
tgtattaaactaaaatgcc

SEQ ID NO: 12439 - RNA, 19 nt, synthetic construct
  source 1..19: mol_type = other RNA
ttgtattaaactaaaatgc

SEQ ID NO: 12440 - RNA, 19 nt, synthetic construct
  source 1..19: mol_type = other RNA
tttgtattaaactaaaatg

SEQ ID NO: 12441 - RNA, 19 nt, synthetic construct
  source 1..19: mol_type = other RNA
gtttgtattaaactaaaat

SEQ ID NO: 12442 - RNA, 19 nt, synthetic construct
  source 1..19: mol_type = other RNA
agtttgtattaaactaaaa

SEQ ID NO: 12443 - RNA, 19 nt, synthetic construct
  source 1..19: mol_type = other RNA
tagtttgtattaaactaaa

SEQ ID NO: 12444 - RNA, 19 nt, synthetic construct
  source 1..19: mol_type = other RNA
ttagtttgtattaaactaa

SEQ ID NO: 12445 - RNA, 19 nt, synthetic construct
  source 1..19: mol_type = other RNA
attagtttgtattaaacta

SEQ ID NO: 12446 - RNA, 19 nt, synthetic construct
  source 1..19: mol_type = other RNA
cattagtttgtattaaact

SEQ ID NO: 12447 - RNA, 19 nt, synthetic construct
  source 1..19: mol_type = other RNA
tcattagtttgtattaaac

SEQ ID NO: 12448 - RNA, 19 nt, synthetic construct
  source 1..19: mol_type = other RNA
atcattagtttgtattaaa

SEQ ID NO: 12449 - RNA, 19 nt, synthetic construct
  source 1..19: mol_type = other RNA
aatcattagtttgtattaa

SEQ ID NO: 12450 - RNA, 19 nt, synthetic construct
  source 1..19: mol_type = other RNA
caatcattagtttgtatta

SEQ ID NO: 12451 - RNA, 19 nt, synthetic construct
  source 1..19: mol_type = other RNA
gcaatcattagtttgtatt

SEQ ID NO: 12452 - RNA, 19 nt, synthetic construct
  source 1..19: mol_type = other RNA
tgcaatcattagtttgtat

SEQ ID NO: 12453 - RNA, 19 nt, synthetic construct
  source 1..19: mol_type = other RNA
atgcaatcattagtttgta

SEQ ID NO: 12454 - RNA, 19 nt, synthetic construct
  source 1..19: mol_type = other RNA
aatgcaatcattagtttgt

SEQ ID NO: 12455 - RNA, 19 nt, synthetic construct
  source 1..19: mol_type = other RNA
aaatgcaatcattagtttg

SEQ ID NO: 12456 - RNA, 19 nt, synthetic construct
  source 1..19: mol_type = other RNA
caaatgcaatcattagttt

SEQ ID NO: 12457 - RNA, 19 nt, synthetic construct
  source 1..19: mol_type = other RNA
tcaaatgcaatcattagtt

SEQ ID NO: 12458 - RNA, 19 nt, synthetic construct
  source 1..19: mol_type = other RNA
ttcaaatgcaatcattagt

SEQ ID NO: 12459 - RNA, 19 nt, synthetic construct
  source 1..19: mol_type = other RNA
tttcaaatgcaatcattag

SEQ ID NO: 12460 - RNA, 19 nt, synthetic construct
  source 1..19: mol_type = other RNA
ctttcaaatgcaatcatta

SEQ ID NO: 12461 - RNA, 19 nt, synthetic construct
  source 1..19: mol_type = other RNA
tctttcaaatgcaatcatt

SEQ ID NO: 12462 - RNA, 19 nt, synthetic construct
  source 1..19: mol_type = other RNA
ctctttcaaatgcaatcat

SEQ ID NO: 12463 - RNA, 19 nt, synthetic construct
  source 1..19: mol_type = other RNA
tctctttcaaatgcaatca

SEQ ID NO: 12464 - RNA, 19 nt, synthetic construct
  source 1..19: mol_type = other RNA
atctctttcaaatgcaatc

SEQ ID NO: 12465 - RNA, 19 nt, synthetic construct
  source 1..19: mol_type = other RNA
aatctctttcaaatgcaat

SEQ ID NO: 12466 - RNA, 19 nt, synthetic construct
  source 1..19: mol_type = other RNA
gaatctctttcaaatgcaa

SEQ ID NO: 12467 - RNA, 19 nt, synthetic construct
  source 1..19: mol_type = other RNA
agaatctctttcaaatgca

SEQ ID NO: 12468 - RNA, 19 nt, synthetic construct
  source 1..19: mol_type = other RNA
aagaatctctttcaaatgc

SEQ ID NO: 12469 - RNA, 19 nt, synthetic construct
  source 1..19: mol_type = other RNA
caagaatctctttcaaatg

SEQ ID NO: 12470 - RNA, 19 nt, synthetic construct
  source 1..19: mol_type = other RNA
tcaagaatctctttcaaat

SEQ ID NO: 12471 - RNA, 19 nt, synthetic construct
  source 1..19: mol_type = other RNA
gtcaagaatctctttcaaa

SEQ ID NO: 12472 - RNA, 19 nt, synthetic construct
  source 1..19: mol_type = other RNA
ggtcaagaatctctttcaa

SEQ ID NO: 12473 - RNA, 19 nt, synthetic construct
  source 1..19: mol_type = other RNA
aggtcaagaatctctttca

SEQ ID NO: 12474 - RNA, 19 nt, synthetic construct
  source 1..19: mol_type = other RNA
aaggtcaagaatctctttc

SEQ ID NO: 12475 - RNA, 19 nt, synthetic construct
  source 1..19: mol_type = other RNA
taaggtcaagaatctcttt

SEQ ID NO: 12476 - RNA, 19 nt, synthetic construct
  source 1..19: mol_type = other RNA
ataaggtcaagaatctctt

SEQ ID NO: 12477 - RNA, 19 nt, synthetic construct
  source 1..19: mol_type = other RNA
aataaggtcaagaatctct

SEQ ID NO: 12478 - RNA, 19 nt, synthetic construct
  source 1..19: mol_type = other RNA
aaataaggtcaagaatctc

SEQ ID NO: 12479 - RNA, 19 nt, synthetic construct
  source 1..19: mol_type = other RNA
gaaataaggtcaagaatct

SEQ ID NO: 12480 - RNA, 19 nt, synthetic construct
  source 1..19: mol_type = other RNA
agaaataaggtcaagaatc

SEQ ID NO: 12481 - RNA, 19 nt, synthetic construct
  source 1..19: mol_type = other RNA
tagaaataaggtcaagaat

SEQ ID NO: 12482 - RNA, 19 nt, synthetic construct
  source 1..19: mol_type = other RNA
ttagaaataaggtcaagaa

SEQ ID NO: 12483 - RNA, 19 nt, synthetic construct
  source 1..19: mol_type = other RNA
tttagaaataaggtcaaga

SEQ ID NO: 12484 - RNA, 19 nt, synthetic construct
  source 1..19: mol_type = other RNA
gtttagaaataaggtcaag

SEQ ID NO: 12485 - RNA, 19 nt, synthetic construct
  source 1..19: mol_type = other RNA
cgtttagaaataaggtcaa

SEQ ID NO: 12486 - RNA, 19 nt, synthetic construct
  source 1..19: mol_type = other RNA
acgtttagaaataaggtca

SEQ ID NO: 12487 - RNA, 19 nt, synthetic construct
  source 1..19: mol_type = other RNA
gacgtttagaaataaggtc

SEQ ID NO: 12488 - RNA, 19 nt, synthetic construct
  source 1..19: mol_type = other RNA
agacgtttagaaataaggt

SEQ ID NO: 12489 - RNA, 19 nt, synthetic construct
  source 1..19: mol_type = other RNA
tagacgtttagaaataagg

SEQ ID NO: 12490 - RNA, 19 nt, synthetic construct
  source 1..19: mol_type = other RNA
ctagacgtttagaaataag

SEQ ID NO: 12491 - RNA, 19 nt, synthetic construct
  source 1..19: mol_type = other RNA
tctagacgtttagaaataa

SEQ ID NO: 12492 - RNA, 19 nt, synthetic construct
  source 1..19: mol_type = other RNA
ctctagacgtttagaaata

SEQ ID NO: 12493 - RNA, 19 nt, synthetic construct
  source 1..19: mol_type = other RNA
gctctagacgtttagaaat

SEQ ID NO: 12494 - RNA, 19 nt, synthetic construct
  source 1..19: mol_type = other RNA
agctctagacgtttagaaa

SEQ ID NO: 12495 - RNA, 19 nt, synthetic construct
  source 1..19: mol_type = other RNA
gagctctagacgtttagaa

SEQ ID NO: 12496 - RNA, 19 nt, synthetic construct
  source 1..19: mol_type = other RNA
agagctctagacgtttaga

SEQ ID NO: 12497 - RNA, 19 nt, synthetic construct
  source 1..19: mol_type = other RNA
cagagctctagacgtttag

SEQ ID NO: 12498 - RNA, 19 nt, synthetic construct
  source 1..19: mol_type = other RNA
tcagagctctagacgttta

SEQ ID NO: 12499 - RNA, 19 nt, synthetic construct
  source 1..19: mol_type = other RNA
ttcagagctctagacgttt

SEQ ID NO: 12500 - RNA, 19 nt, synthetic construct
  source 1..19: mol_type = other RNA
tttcagagctctagacgtt

SEQ ID NO: 12501 - RNA, 19 nt, synthetic construct
  source 1..19: mol_type = other RNA
atttcagagctctagacgt

SEQ ID NO: 12502 - RNA, 19 nt, synthetic construct
  source 1..19: mol_type = other RNA
catttcagagctctagacg

SEQ ID NO: 12503 - RNA, 19 nt, synthetic construct
  source 1..19: mol_type = other RNA
acatttcagagctctagac

SEQ ID NO: 12504 - RNA, 19 nt, synthetic construct
  source 1..19: mol_type = other RNA
gacatttcagagctctaga

SEQ ID NO: 12505 - RNA, 19 nt, synthetic construct
  source 1..19: mol_type = other RNA
agacatttcagagctctag

SEQ ID NO: 12506 - RNA, 19 nt, synthetic construct
  source 1..19: mol_type = other RNA
aagacatttcagagctcta

SEQ ID NO: 12507 - RNA, 19 nt, synthetic construct
  source 1..19: mol_type = other RNA
caagacatttcagagctct

SEQ ID NO: 12508 - RNA, 19 nt, synthetic construct
  source 1..19: mol_type = other RNA
tcaagacatttcagagctc

SEQ ID NO: 12509 - RNA, 19 nt, synthetic construct
  source 1..19: mol_type = other RNA
atcaagacatttcagagct

SEQ ID NO: 12510 - RNA, 19 nt, synthetic construct
  source 1..19: mol_type = other RNA
catcaagacatttcagagc

SEQ ID NO: 12511 - RNA, 19 nt, synthetic construct
  source 1..19: mol_type = other RNA
ccatcaagacatttcagag

SEQ ID NO: 12512 - RNA, 19 nt, synthetic construct
  source 1..19: mol_type = other RNA
tccatcaagacatttcaga

SEQ ID NO: 12513 - RNA, 19 nt, synthetic construct
  source 1..19: mol_type = other RNA
ttccatcaagacatttcag

SEQ ID NO: 12514 - RNA, 19 nt, synthetic construct
  source 1..19: mol_type = other RNA
cttccatcaagacatttca

SEQ ID NO: 12515 - RNA, 19 nt, synthetic construct
  source 1..19: mol_type = other RNA
ccttccatcaagacatttc

SEQ ID NO: 12516 - RNA, 19 nt, synthetic construct
  source 1..19: mol_type = other RNA
accttccatcaagacattt

SEQ ID NO: 12517 - RNA, 19 nt, synthetic construct
  source 1..19: mol_type = other RNA
taccttccatcaagacatt

SEQ ID NO: 12518 - RNA, 19 nt, synthetic construct
  source 1..19: mol_type = other RNA
ataccttccatcaagacat

SEQ ID NO: 12519 - RNA, 19 nt, synthetic construct
  source 1..19: mol_type = other RNA
aataccttccatcaagaca

SEQ ID NO: 12520 - RNA, 19 nt, synthetic construct
  source 1..19: mol_type = other RNA
taataccttccatcaagac

SEQ ID NO: 12521 - RNA, 19 nt, synthetic construct
  source 1..19: mol_type = other RNA
ttaataccttccatcaaga

SEQ ID NO: 12522 - RNA, 19 nt, synthetic construct
  source 1..19: mol_type = other RNA
tttaataccttccatcaag

SEQ ID NO: 12523 - RNA, 19 nt, synthetic construct
  source 1..19: mol_type = other RNA
gtttaataccttccatcaa

SEQ ID NO: 12524 - RNA, 19 nt, synthetic construct
  source 1..19: mol_type = other RNA
agtttaataccttccatca

SEQ ID NO: 12525 - RNA, 19 nt, synthetic construct
  source 1..19: mol_type = other RNA
tagtttaataccttccatc

SEQ ID NO: 12526 - RNA, 19 nt, synthetic construct
  source 1..19: mol_type = other RNA
atagtttaataccttccat

SEQ ID NO: 12527 - RNA, 19 nt, synthetic construct
  source 1..19: mol_type = other RNA
aatagtttaataccttcca

SEQ ID NO: 12528 - RNA, 19 nt, synthetic construct
  source 1..19: mol_type = other RNA
aaatagtttaataccttcc

SEQ ID NO: 12529 - RNA, 19 nt, synthetic construct
  source 1..19: mol_type = other RNA
caaatagtttaataccttc

SEQ ID NO: 12530 - RNA, 19 nt, synthetic construct
  source 1..19: mol_type = other RNA
gcaaatagtttaatacctt

SEQ ID NO: 12531 - RNA, 19 nt, synthetic construct
  source 1..19: mol_type = other RNA
ggcaaatagtttaatacct

SEQ ID NO: 12532 - RNA, 19 nt, synthetic construct
  source 1..19: mol_type = other RNA
aggcaaatagtttaatacc

SEQ ID NO: 12533 - RNA, 19 nt, synthetic construct
  source 1..19: mol_type = other RNA
caggcaaatagtttaatac

SEQ ID NO: 12534 - RNA, 19 nt, synthetic construct
  source 1..19: mol_type = other RNA
acaggcaaatagtttaata

SEQ ID NO: 12535 - RNA, 19 nt, synthetic construct
  source 1..19: mol_type = other RNA
aacaggcaaatagtttaat

SEQ ID NO: 12536 - RNA, 19 nt, synthetic construct
  source 1..19: mol_type = other RNA
caacaggcaaatagtttaa

SEQ ID NO: 12537 - RNA, 19 nt, synthetic construct
  source 1..19: mol_type = other RNA
acaacaggcaaatagttta

SEQ ID NO: 12538 - RNA, 19 nt, synthetic construct
  source 1..19: mol_type = other RNA
tacaacaggcaaatagttt

SEQ ID NO: 12539 - RNA, 19 nt, synthetic construct
  source 1..19: mol_type = other RNA
gtacaacaggcaaatagtt

SEQ ID NO: 12540 - RNA, 19 nt, synthetic construct
  source 1..19: mol_type = other RNA
tgtacaacaggcaaatagt

SEQ ID NO: 12541 - RNA, 19 nt, synthetic construct
  source 1..19: mol_type = other RNA
ttgtacaacaggcaaatag

SEQ ID NO: 12542 - RNA, 19 nt, synthetic construct
  source 1..19: mol_type = other RNA
tttgtacaacaggcaaata

SEQ ID NO: 12543 - RNA, 19 nt, synthetic construct
  source 1..19: mol_type = other RNA
ctttgtacaacaggcaaat

SEQ ID NO: 12544 - RNA, 19 nt, synthetic construct
  source 1..19: mol_type = other RNA
tctttgtacaacaggcaaa

SEQ ID NO: 12545 - RNA, 19 nt, synthetic construct
  source 1..19: mol_type = other RNA
ttctttgtacaacaggcaa

SEQ ID NO: 12546 - RNA, 19 nt, synthetic construct
  source 1..19: mol_type = other RNA
tttctttgtacaacaggca

SEQ ID NO: 12547 - RNA, 19 nt, synthetic construct
  source 1..19: mol_type = other RNA
atttctttgtacaacaggc

SEQ ID NO: 12548 - RNA, 19 nt, synthetic construct
  source 1..19: mol_type = other RNA
catttctttgtacaacagg

SEQ ID NO: 12549 - RNA, 19 nt, synthetic construct
  source 1..19: mol_type = other RNA
acatttctttgtacaacag

SEQ ID NO: 12550 - RNA, 19 nt, synthetic construct
  source 1..19: mol_type = other RNA
aacatttctttgtacaaca

SEQ ID NO: 12551 - RNA, 19 nt, synthetic construct
  source 1..19: mol_type = other RNA
taacatttctttgtacaac

SEQ ID NO: 12552 - RNA, 19 nt, synthetic construct
  source 1..19: mol_type = other RNA
ttaacatttctttgtacaa

SEQ ID NO: 12553 - RNA, 19 nt, synthetic construct
  source 1..19: mol_type = other RNA
cttaacatttctttgtaca

SEQ ID NO: 12554 - RNA, 19 nt, synthetic construct
  source 1..19: mol_type = other RNA
tcttaacatttctttgtac

SEQ ID NO: 12555 - RNA, 19 nt, synthetic construct
  source 1..19: mol_type = other RNA
gtcttaacatttctttgta

SEQ ID NO: 12556 - RNA, 19 nt, synthetic construct
  source 1..19: mol_type = other RNA
agtcttaacatttctttgt

SEQ ID NO: 12557 - RNA, 19 nt, synthetic construct
  source 1..19: mol_type = other RNA
gagtcttaacatttctttg

SEQ ID NO: 12558 - RNA, 19 nt, synthetic construct
  source 1..19: mol_type = other RNA
cgagtcttaacatttcttt

SEQ ID NO: 12559 - RNA, 19 nt, synthetic construct
  source 1..19: mol_type = other RNA
acgagtcttaacatttctt

SEQ ID NO: 12560 - RNA, 19 nt, synthetic construct
  source 1..19: mol_type = other RNA
cacgagtcttaacatttct

SEQ ID NO: 12561 - RNA, 19 nt, synthetic construct
  source 1..19: mol_type = other RNA
tcacgagtcttaacatttc

SEQ ID NO: 12562 - RNA, 19 nt, synthetic construct
  source 1..19: mol_type = other RNA
ttcacgagtcttaacattt

SEQ ID NO: 12563 - RNA, 19 nt, synthetic construct
  source 1..19: mol_type = other RNA
tttcacgagtcttaacatt

SEQ ID NO: 12564 - RNA, 19 nt, synthetic construct
  source 1..19: mol_type = other RNA
ttttcacgagtcttaacat

SEQ ID NO: 12565 - RNA, 19 nt, synthetic construct
  source 1..19: mol_type = other RNA
cttttcacgagtcttaaca

SEQ ID NO: 12566 - RNA, 19 nt, synthetic construct
  source 1..19: mol_type = other RNA
tcttttcacgagtcttaac

SEQ ID NO: 12567 - RNA, 19 nt, synthetic construct
  source 1..19: mol_type = other RNA
ttcttttcacgagtcttaa

SEQ ID NO: 12568 - RNA, 19 nt, synthetic construct
  source 1..19: mol_type = other RNA
attcttttcacgagtctta

SEQ ID NO: 12569 - RNA, 19 nt, synthetic construct
  source 1..19: mol_type = other RNA
aattcttttcacgagtctt

SEQ ID NO: 12570 - RNA, 19 nt, synthetic construct
  source 1..19: mol_type = other RNA
taattcttttcacgagtct

SEQ ID NO: 12571 - RNA, 19 nt, synthetic construct
  source 1..19: mol_type = other RNA
gtaattcttttcacgagtc

SEQ ID NO: 12572 - RNA, 19 nt, synthetic construct
  source 1..19: mol_type = other RNA
agtaattcttttcacgagt

SEQ ID NO: 12573 - RNA, 19 nt, synthetic construct
  source 1..19: mol_type = other RNA
tagtaattcttttcacgag

SEQ ID NO: 12574 - RNA, 19 nt, synthetic construct
  source 1..19: mol_type = other RNA
atagtaattcttttcacga

SEQ ID NO: 12575 - RNA, 19 nt, synthetic construct
  source 1..19: mol_type = other RNA
tatagtaattcttttcacg

SEQ ID NO: 12576 - RNA, 19 nt, synthetic construct
  source 1..19: mol_type = other RNA
ttatagtaattcttttcac

SEQ ID NO: 12577 - RNA, 19 nt, synthetic construct
  source 1..19: mol_type = other RNA
cttatagtaattcttttca

SEQ ID NO: 12578 - RNA, 19 nt, synthetic construct
  source 1..19: mol_type = other RNA
ccttatagtaattcttttc

SEQ ID NO: 12579 - RNA, 19 nt, synthetic construct
  source 1..19: mol_type = other RNA
accttatagtaattctttt

SEQ ID NO: 12580 - RNA, 19 nt, synthetic construct
  source 1..19: mol_type = other RNA
taccttatagtaattcttt

SEQ ID NO: 12581 - RNA, 19 nt, synthetic construct
  source 1..19: mol_type = other RNA
gtaccttatagtaattctt

SEQ ID NO: 12582 - RNA, 19 nt, synthetic construct
  source 1..19: mol_type = other RNA
agtaccttatagtaattct

SEQ ID NO: 12583 - RNA, 19 nt, synthetic construct
  source 1..19: mol_type = other RNA
cagtaccttatagtaattc

SEQ ID NO: 12584 - RNA, 19 nt, synthetic construct
  source 1..19: mol_type = other RNA
acagtaccttatagtaatt

SEQ ID NO: 12585 - RNA, 19 nt, synthetic construct
  source 1..19: mol_type = other RNA
cacagtaccttatagtaat

SEQ ID NO: 12586 - RNA, 19 nt, synthetic construct
  source 1..19: mol_type = other RNA
tcacagtaccttatagtaa

SEQ ID NO: 12587 - RNA, 19 nt, synthetic construct
  source 1..19: mol_type = other RNA
ttcacagtaccttatagta

SEQ ID NO: 12588 - RNA, 19 nt, synthetic construct
  source 1..19: mol_type = other RNA
tttcacagtaccttatagt

SEQ ID NO: 12589 - RNA, 19 nt, synthetic construct
  source 1..19: mol_type = other RNA
atttcacagtaccttatag

SEQ ID NO: 12590 - RNA, 19 nt, synthetic construct
  source 1..19: mol_type = other RNA
tatttcacagtaccttata

SEQ ID NO: 12591 - RNA, 19 nt, synthetic construct
  source 1..19: mol_type = other RNA
ttatttcacagtaccttat

SEQ ID NO: 12592 - RNA, 19 nt, synthetic construct
  source 1..19: mol_type = other RNA
gttatttcacagtacctta

SEQ ID NO: 12593 - RNA, 19 nt, synthetic construct
  source 1..19: mol_type = other RNA
agttatttcacagtacctt

SEQ ID NO: 12594 - RNA, 19 nt, synthetic construct
  source 1..19: mol_type = other RNA
cagttatttcacagtacct

SEQ ID NO: 12595 - RNA, 19 nt, synthetic construct
  source 1..19: mol_type = other RNA
gcagttatttcacagtacc

SEQ ID NO: 12596 - RNA, 19 nt, synthetic construct
  source 1..19: mol_type = other RNA
cgcagttatttcacagtac

SEQ ID NO: 12597 - RNA, 19 nt, synthetic construct
  source 1..19: mol_type = other RNA
tcgcagttatttcacagta

SEQ ID NO: 12598 - RNA, 19 nt, synthetic construct
  source 1..19: mol_type = other RNA
atcgcagttatttcacagt

SEQ ID NO: 12599 - RNA, 19 nt, synthetic construct
  source 1..19: mol_type = other RNA
aatcgcagttatttcacag

SEQ ID NO: 12600 - RNA, 19 nt, synthetic construct
  source 1..19: mol_type = other RNA
aaatcgcagttatttcaca

SEQ ID NO: 12601 - RNA, 19 nt, synthetic construct
  source 1..19: mol_type = other RNA
aaaatcgcagttatttcac

SEQ ID NO: 12602 - RNA, 19 nt, synthetic construct
  source 1..19: mol_type = other RNA
caaaatcgcagttatttca

SEQ ID NO: 12603 - RNA, 19 nt, synthetic construct
  source 1..19: mol_type = other RNA
acaaaatcgcagttatttc

SEQ ID NO: 12604 - RNA, 19 nt, synthetic construct
  source 1..19: mol_type = other RNA
cacaaaatcgcagttattt

SEQ ID NO: 12605 - RNA, 19 nt, synthetic construct
  source 1..19: mol_type = other RNA
tcacaaaatcgcagttatt

SEQ ID NO: 12606 - RNA, 19 nt, synthetic construct
  source 1..19: mol_type = other RNA
ctcacaaaatcgcagttat

SEQ ID NO: 12607 - RNA, 19 nt, synthetic construct
  source 1..19: mol_type = other RNA
gctcacaaaatcgcagtta

SEQ ID NO: 12608 - RNA, 19 nt, synthetic construct
  source 1..19: mol_type = other RNA
tgctcacaaaatcgcagtt

SEQ ID NO: 12609 - RNA, 19 nt, synthetic construct
  source 1..19: mol_type = other RNA
ttgctcacaaaatcgcagt

SEQ ID NO: 12610 - RNA, 19 nt, synthetic construct
  source 1..19: mol_type = other RNA
tttgctcacaaaatcgcag

SEQ ID NO: 12611 - RNA, 19 nt, synthetic construct
  source 1..19: mol_type = other RNA
ttttgctcacaaaatcgca

SEQ ID NO: 12612 - RNA, 19 nt, synthetic construct
  source 1..19: mol_type = other RNA
gttttgctcacaaaatcgc

SEQ ID NO: 12613 - RNA, 19 nt, synthetic construct
  source 1..19: mol_type = other RNA
tgttttgctcacaaaatcg

SEQ ID NO: 12614 - RNA, 19 nt, synthetic construct
  source 1..19: mol_type = other RNA
atgttttgctcacaaaatc

SEQ ID NO: 12615 - RNA, 19 nt, synthetic construct
  source 1..19: mol_type = other RNA
tatgttttgctcacaaaat

SEQ ID NO: 12616 - RNA, 19 nt, synthetic construct
  source 1..19: mol_type = other RNA
gtatgttttgctcacaaaa

SEQ ID NO: 12617 - RNA, 19 nt, synthetic construct
  source 1..19: mol_type = other RNA
agtatgttttgctcacaaa

SEQ ID NO: 12618 - RNA, 19 nt, synthetic construct
  source 1..19: mol_type = other RNA
aagtatgttttgctcacaa

SEQ ID NO: 12619 - RNA, 19 nt, synthetic construct
  source 1..19: mol_type = other RNA
caagtatgttttgctcaca

SEQ ID NO: 12620 - RNA, 19 nt, synthetic construct
  source 1..19: mol_type = other RNA
ccaagtatgttttgctcac

SEQ ID NO: 12621 - RNA, 19 nt, synthetic construct
  source 1..19: mol_type = other RNA
tccaagtatgttttgctca

SEQ ID NO: 12622 - RNA, 19 nt, synthetic construct
  source 1..19: mol_type = other RNA
ttccaagtatgttttgctc

SEQ ID NO: 12623 - RNA, 19 nt, synthetic construct
  source 1..19: mol_type = other RNA
tttccaagtatgttttgct

SEQ ID NO: 12624 - RNA, 19 nt, synthetic construct
  source 1..19: mol_type = other RNA
atttccaagtatgttttgc

SEQ ID NO: 12625 - RNA, 19 nt, synthetic construct
  source 1..19: mol_type = other RNA
catttccaagtatgttttg

SEQ ID NO: 12626 - RNA, 19 nt, synthetic construct
  source 1..19: mol_type = other RNA
gcatttccaagtatgtttt

SEQ ID NO: 12627 - RNA, 19 nt, synthetic construct
  source 1..19: mol_type = other RNA
agcatttccaagtatgttt

SEQ ID NO: 12628 - RNA, 19 nt, synthetic construct
  source 1..19: mol_type = other RNA
cagcatttccaagtatgtt

SEQ ID NO: 12629 - RNA, 19 nt, synthetic construct
  source 1..19: mol_type = other RNA
tcagcatttccaagtatgt

SEQ ID NO: 12630 - RNA, 19 nt, synthetic construct
  source 1..19: mol_type = other RNA
atcagcatttccaagtatg

SEQ ID NO: 12631 - RNA, 19 nt, synthetic construct
  source 1..19: mol_type = other RNA
aatcagcatttccaagtat

SEQ ID NO: 12632 - RNA, 19 nt, synthetic construct
  source 1..19: mol_type = other RNA
caatcagcatttccaagta

SEQ ID NO: 12633 - RNA, 19 nt, synthetic construct
  source 1..19: mol_type = other RNA
tcaatcagcatttccaagt

SEQ ID NO: 12634 - RNA, 19 nt, synthetic construct
  source 1..19: mol_type = other RNA
atcaatcagcatttccaag

SEQ ID NO: 12635 - RNA, 19 nt, synthetic construct
  source 1..19: mol_type = other RNA
aatcaatcagcatttccaa

SEQ ID NO: 12636 - RNA, 19 nt, synthetic construct
  source 1..19: mol_type = other RNA
aaatcaatcagcatttcca

SEQ ID NO: 12637 - RNA, 19 nt, synthetic construct
  source 1..19: mol_type = other RNA
aaaatcaatcagcatttcc

SEQ ID NO: 12638 - RNA, 19 nt, synthetic construct
  source 1..19: mol_type = other RNA
aaaaatcaatcagcatttc

SEQ ID NO: 12639 - RNA, 19 nt, synthetic construct
  source 1..19: mol_type = other RNA
taaaaatcaatcagcattt

SEQ ID NO: 12640 - RNA, 19 nt, synthetic construct
  source 1..19: mol_type = other RNA
ataaaaatcaatcagcatt

SEQ ID NO: 12641 - RNA, 19 nt, synthetic construct
  source 1..19: mol_type = other RNA
cataaaaatcaatcagcat

SEQ ID NO: 12642 - RNA, 19 nt, synthetic construct
  source 1..19: mol_type = other RNA
gcataaaaatcaatcagca

SEQ ID NO: 12643 - RNA, 19 nt, synthetic construct
  source 1..19: mol_type = other RNA
agcataaaaatcaatcagc

SEQ ID NO: 12644 - RNA, 19 nt, synthetic construct
  source 1..19: mol_type = other RNA
aagcataaaaatcaatcag

SEQ ID NO: 12645 - RNA, 19 nt, synthetic construct
  source 1..19: mol_type = other RNA
caagcataaaaatcaatca

SEQ ID NO: 12646 - RNA, 19 nt, synthetic construct
  source 1..19: mol_type = other RNA
acaagcataaaaatcaatc

SEQ ID NO: 12647 - RNA, 19 nt, synthetic construct
  source 1..19: mol_type = other RNA
aacaagcataaaaatcaat

SEQ ID NO: 12648 - RNA, 19 nt, synthetic construct
  source 1..19: mol_type = other RNA
taacaagcataaaaatcaa

SEQ ID NO: 12649 - RNA, 19 nt, synthetic construct
  source 1..19: mol_type = other RNA
ctaacaagcataaaaatca

SEQ ID NO: 12650 - RNA, 19 nt, synthetic construct
  source 1..19: mol_type = other RNA
actaacaagcataaaaatc

SEQ ID NO: 12651 - RNA, 19 nt, synthetic construct
  source 1..19: mol_type = other RNA
cactaacaagcataaaaat

SEQ ID NO: 12652 - RNA, 19 nt, synthetic construct
  source 1..19: mol_type = other RNA
acactaacaagcataaaaa

SEQ ID NO: 12653 - RNA, 19 nt, synthetic construct
  source 1..19: mol_type = other RNA
tacactaacaagcataaaa

SEQ ID NO: 12654 - RNA, 19 nt, synthetic construct
  source 1..19: mol_type = other RNA
atacactaacaagcataaa

SEQ ID NO: 12655 - RNA, 19 nt, synthetic construct
  source 1..19: mol_type = other RNA
aatacactaacaagcataa

SEQ ID NO: 12656 - RNA, 19 nt, synthetic construct
  source 1..19: mol_type = other RNA
caatacactaacaagcata

SEQ ID NO: 12657 - RNA, 19 nt, synthetic construct
  source 1..19: mol_type = other RNA
gcaatacactaacaagcat

SEQ ID NO: 12658 - RNA, 19 nt, synthetic construct
  source 1..19: mol_type = other RNA
tgcaatacactaacaagca

SEQ ID NO: 12659 - RNA, 19 nt, synthetic construct
  source 1..19: mol_type = other RNA
ttgcaatacactaacaagc

SEQ ID NO: 12660 - RNA, 19 nt, synthetic construct
  source 1..19: mol_type = other RNA
cttgcaatacactaacaag

SEQ ID NO: 12661 - RNA, 19 nt, synthetic construct
  source 1..19: mol_type = other RNA
tcttgcaatacactaacaa

SEQ ID NO: 12662 - RNA, 19 nt, synthetic construct
  source 1..19: mol_type = other RNA
ttcttgcaatacactaaca

SEQ ID NO: 12663 - RNA, 19 nt, synthetic construct
  source 1..19: mol_type = other RNA
tttcttgcaatacactaac

SEQ ID NO: 12664 - RNA, 19 nt, synthetic construct
  source 1..19: mol_type = other RNA
gtttcttgcaatacactaa

SEQ ID NO: 12665 - RNA, 19 nt, synthetic construct
  source 1..19: mol_type = other RNA
tgtttcttgcaatacacta

SEQ ID NO: 12666 - RNA, 19 nt, synthetic construct
  source 1..19: mol_type = other RNA
gtgtttcttgcaatacact

SEQ ID NO: 12667 - RNA, 19 nt, synthetic construct
  source 1..19: mol_type = other RNA
tgtgtttcttgcaatacac

SEQ ID NO: 12668 - RNA, 19 nt, synthetic construct
  source 1..19: mol_type = other RNA
ctgtgtttcttgcaataca

SEQ ID NO: 12669 - RNA, 19 nt, synthetic construct
  source 1..19: mol_type = other RNA
tctgtgtttcttgcaatac

SEQ ID NO: 12670 - RNA, 19 nt, synthetic construct
  source 1..19: mol_type = other RNA
ttctgtgtttcttgcaata

SEQ ID NO: 12671 - RNA, 19 nt, synthetic construct
  source 1..19: mol_type = other RNA
tttctgtgtttcttgcaat

SEQ ID NO: 12672 - RNA, 19 nt, synthetic construct
  source 1..19: mol_type = other RNA
ttttctgtgtttcttgcaa

SEQ ID NO: 12673 - RNA, 19 nt, synthetic construct
  source 1..19: mol_type = other RNA
attttctgtgtttcttgca

SEQ ID NO: 12674 - RNA, 19 nt, synthetic construct
  source 1..19: mol_type = other RNA
cattttctgtgtttcttgc

SEQ ID NO: 12675 - RNA, 19 nt, synthetic construct
  source 1..19: mol_type = other RNA
acattttctgtgtttcttg

SEQ ID NO: 12676 - RNA, 19 nt, synthetic construct
  source 1..19: mol_type = other RNA
tacattttctgtgtttctt

SEQ ID NO: 12677 - RNA, 19 nt, synthetic construct
  source 1..19: mol_type = other RNA
ctacattttctgtgtttct

SEQ ID NO: 12678 - RNA, 19 nt, synthetic construct
  source 1..19: mol_type = other RNA
actacattttctgtgtttc

SEQ ID NO: 12679 - RNA, 19 nt, synthetic construct
  source 1..19: mol_type = other RNA
aactacattttctgtgttt

SEQ ID NO: 12680 - RNA, 19 nt, synthetic construct
  source 1..19: mol_type = other RNA
aaactacattttctgtgtt

SEQ ID NO: 12681 - RNA, 19 nt, synthetic construct
  source 1..19: mol_type = other RNA
aaaactacattttctgtgt

SEQ ID NO: 12682 - RNA, 19 nt, synthetic construct
  source 1..19: mol_type = other RNA
caaaactacattttctgtg

SEQ ID NO: 12683 - RNA, 19 nt, synthetic construct
  source 1..19: mol_type = other RNA
acaaaactacattttctgt

SEQ ID NO: 12684 - RNA, 19 nt, synthetic construct
  source 1..19: mol_type = other RNA
aacaaaactacattttctg

SEQ ID NO: 12685 - RNA, 19 nt, synthetic construct
  source 1..19: mol_type = other RNA
aaacaaaactacattttct

SEQ ID NO: 12686 - RNA, 19 nt, synthetic construct
  source 1..19: mol_type = other RNA
aaaacaaaactacattttc

SEQ ID NO: 12687 - RNA, 19 nt, synthetic construct
  source 1..19: mol_type = other RNA
taaaacaaaactacatttt

SEQ ID NO: 12688 - RNA, 19 nt, synthetic construct
  source 1..19: mol_type = other RNA
ttaaaacaaaactacattt

SEQ ID NO: 12689 - RNA, 19 nt, synthetic construct
  source 1..19: mol_type = other RNA
attaaaacaaaactacatt

SEQ ID NO: 12690 - RNA, 19 nt, synthetic construct
  source 1..19: mol_type = other RNA
tattaaaacaaaactacat

SEQ ID NO: 12691 - RNA, 19 nt, synthetic construct
  source 1..19: mol_type = other RNA
ttattaaaacaaaactaca

SEQ ID NO: 12692 - RNA, 19 nt, synthetic construct
  source 1..19: mol_type = other RNA
tttattaaaacaaaactac

SEQ ID NO: 12693 - RNA, 19 nt, synthetic construct
  source 1..19: mol_type = other RNA
gtttattaaaacaaaacta

SEQ ID NO: 12694 - RNA, 19 nt, synthetic construct
  source 1..19: mol_type = other RNA
ggtttattaaaacaaaact

SEQ ID NO: 12695 - RNA, 19 nt, synthetic construct
  source 1..19: mol_type = other RNA
tggtttattaaaacaaaac

SEQ ID NO: 12696 - RNA, 19 nt, synthetic construct
  source 1..19: mol_type = other RNA
ttggtttattaaaacaaaa

SEQ ID NO: 12697 - RNA, 19 nt, synthetic construct
  source 1..19: mol_type = other RNA
tttggtttattaaaacaaa

SEQ ID NO: 12698 - RNA, 19 nt, synthetic construct
  source 1..19: mol_type = other RNA
ttttggtttattaaaacaa

SEQ ID NO: 12699 - RNA, 19 nt, synthetic construct
  source 1..19: mol_type = other RNA
tttttggtttattaaaaca

SEQ ID NO: 12700 - RNA, 19 nt, synthetic construct
  source 1..19: mol_type = other RNA
atttttggtttattaaaac

SEQ ID NO: 12701 - RNA, 19 nt, synthetic construct
  source 1..19: mol_type = other RNA
aatttttggtttattaaaa

SEQ ID NO: 12702 - RNA, 19 nt, synthetic construct
  source 1..19: mol_type = other RNA
caatttttggtttattaaa

SEQ ID NO: 12703 - RNA, 19 nt, synthetic construct
  source 1..19: mol_type = other RNA
tcaatttttggtttattaa

SEQ ID NO: 12704 - RNA, 19 nt, synthetic construct
  source 1..19: mol_type = other RNA
ttcaatttttggtttatta

SEQ ID NO: 12705 - RNA, 19 nt, synthetic construct
  source 1..19: mol_type = other RNA
gttcaatttttggtttatt

SEQ ID NO: 12706 - RNA, 19 nt, synthetic construct
  source 1..19: mol_type = other RNA
tgttcaatttttggtttat

SEQ ID NO: 12707 - RNA, 19 nt, synthetic construct
  source 1..19: mol_type = other RNA
atgttcaatttttggttta

SEQ ID NO: 12708 - RNA, 19 nt, synthetic construct
  source 1..19: mol_type = other RNA
tatgttcaatttttggttt

SEQ ID NO: 12709 - RNA, 21 nt, synthetic construct
  source 1..21: mol_type = other RNA
  misc_feature 1: note = ETL17 moiety with a phosphorothioate linkage
  modified_base 1: mod_base = OTHER; note = 2'-O-methyl modified nucleoside
  modified_base 2: mod_base = OTHER; note = 2'-O-methyl modified nucleoside
  modified_base 3: mod_base = OTHER; note = 2'-O-methyl modified nucleoside
  modified_base 4: mod_base = OTHER; note = 2'-O-methyl modified nucleoside
  modified_base 5: mod_base = OTHER; note = 2'-fluoro-modified nucleoside
  modified_base 6: mod_base = OTHER; note = 2'-fluoro-modified nucleoside
  modified_base 7: mod_base = OTHER; note = 2'-O-methyl modified nucleoside
  modified_base 8: mod_base = OTHER; note = 2'-O-methyl modified nucleoside
  modified_base 9: mod_base = OTHER; note = 2'-fluoro-modified nucleoside
  modified_base 10: mod_base = OTHER; note = 2'-O-methyl modified nucleoside
  modified_base 11: mod_base = OTHER; note = 2'-fluoro-modified nucleoside
  modified_base 12: mod_base = OTHER; note = 2'-O-methyl modified nucleoside
  modified_base 13: mod_base = OTHER; note = 2'-O-methyl modified nucleoside
  modified_base 14: mod_base = OTHER; note = 2'-O-methyl modified nucleoside
  modified_base 15: mod_base = OTHER; note = 2'-O-methyl modified nucleoside
  modified_base 16: mod_base = OTHER; note = 2'-O-methyl modified nucleoside
  modified_base 17: mod_base = OTHER; note = 2'-O-methyl modified nucleoside
  modified_base 18: mod_base = OTHER; note = 2'-O-methyl modified nucleoside
  modified_base 19: mod_base = OTHER; note = 2'-O-methyl modified nucleoside with phosphorothioate linkage
  modified_base 20: mod_base = OTHER; note = 2'-O-methyl modified nucleoside with phosphorothioate linkage
  modified_base 21: mod_base = OTHER; note = 2'-O-methyl modified nucleoside
atcagaatacagtgttggatt

SEQ ID NO: 12710 - RNA, 21 nt, synthetic construct
  source 1..21: mol_type = other RNA
  misc_feature 1: note = ETL17 moiety with a phosphorothioate linkage
  modified_base 1: mod_base = OTHER; note = 2'-O-methyl modified nucleoside
  modified_base 2: mod_base = OTHER; note = 2'-O-methyl modified nucleoside
  modified_base 3: mod_base = OTHER; note = 2'-O-methyl modified nucleoside
  modified_base 4: mod_base = OTHER; note = 2'-O-methyl modified nucleoside
  modified_base 5: mod_base = OTHER; note = 2'-O-methyl modified nucleoside
  modified_base 6: mod_base = OTHER; note = 2'-fluoro-modified nucleoside
  modified_base 7: mod_base = OTHER; note = 2'-O-methyl modified nucleoside
  modified_base 8: mod_base = OTHER; note = 2'-O-methyl modified nucleoside
  modified_base 9: mod_base = OTHER; note = 2'-fluoro-modified nucleoside
  modified_base 10: mod_base = OTHER; note = 2'-O-methyl modified nucleoside
  modified_base 11: mod_base = OTHER; note = 2'-fluoro-modified nucleoside
  modified_base 12: mod_base = OTHER; note = 2'-O-methyl modified nucleoside
  modified_base 13: mod_base = OTHER; note = 2'-O-methyl modified nucleoside
  modified_base 14: mod_base = OTHER; note = 2'-O-methyl modified nucleoside
  modified_base 15: mod_base = OTHER; note = 2'-O-methyl modified nucleoside
  modified_base 16: mod_base = OTHER; note = 2'-O-methyl modified nucleoside
  modified_base 17: mod_base = OTHER; note = 2'-O-methyl modified nucleoside
  modified_base 18: mod_base = OTHER; note = 2'-O-methyl modified nucleoside
  modified_base 19: mod_base = OTHER; note = 2'-O-methyl modified nucleoside with phosphorothioate linkage
  modified_base 20: mod_base = OTHER; note = 2'-O-methyl modified nucleoside with phosphorothioate linkage
  modified_base 21: mod_base = OTHER; note = 2'-O-methyl modified nucleoside
gaatacagtgttggtcgaatt

SEQ ID NO: 12711 - DNA, 21 bp, synthetic construct
  source 1..21: mol_type = other DNA
  misc_feature 1: note = ETL17 moiety with a phosphorothioate linkage
  modified_base 1: mod_base = OTHER; note = 2'-O-methyl modified nucleoside
  modified_base 2: mod_base = OTHER; note = 2'-O-methyl modified nucleoside
  modified_base 3: mod_base = OTHER; note = 2'-O-methyl modified nucleoside
  modified_base 4: mod_base = OTHER; note = 2'-O-methyl modified nucleoside
  modified_base 5: mod_base = OTHER; note = 2'-O-methyl modified nucleoside
  modified_base 6: mod_base = OTHER; note = 2'-fluoro-modified nucleoside
  modified_base 7: mod_base = OTHER; note = 2'-fluoro-modified nucleoside
  modified_base 8: mod_base = OTHER; note = 2'-fluoro-modified nucleoside
  modified_base 10: mod_base = OTHER; note = 2'-O-methyl modified nucleoside
  modified_base 11: mod_base = OTHER; note = 2'-O-methyl modified nucleoside
  modified_base 12: mod_base = OTHER; note = 2'-O-methyl modified nucleoside
  modified_base 13: mod_base = OTHER; note = 2'-O-methyl modified nucleoside
  modified_base 14: mod_base = OTHER; note = 2'-O-methyl modified nucleoside
  modified_base 15: mod_base = OTHER; note = 2'-O-methyl modified nucleoside
  modified_base 16: mod_base = OTHER; note = 2'-O-methyl modified nucleoside
  modified_base 17: mod_base = OTHER; note = 2'-O-methyl modified nucleoside
  modified_base 18: mod_base = OTHER; note = 2'-O-methyl modified nucleoside
  modified_base 19: mod_base = OTHER; note = 2'-O-methyl modified nucleoside with phosphorothioate linkage
  modified_base 20: mod_base = OTHER; note = 2'-O-methyl modified nucleoside with phosphorothioate linkage
  modified_base 21: mod_base = OTHER; note = 2'-O-methyl modified nucleoside
  misc_feature 1..8: note = RNA
  misc_feature 9: note = DNA
  misc_feature 10..21: note = RNA
ctttgggtttgcggaatgatt

SEQ ID NO: 12712 - RNA, 21 nt, synthetic construct
  source 1..21: mol_type = other RNA
  misc_feature 1: note = ETL17 moiety with a phosphorothioate linkage
  modified_base 1: mod_base = OTHER; note = 2'-O-methyl modified nucleoside
  modified_base 2: mod_base = OTHER; note = 2'-O-methyl modified nucleoside
  modified_base 3: mod_base = OTHER; note = 2'-O-methyl modified nucleoside
  modified_base 4: mod_base = OTHER; note = 2'-O-methyl modified nucleoside
  modified_base 5: mod_base = OTHER; note = 2'-fluoro-modified nucleoside
  modified_base 6: mod_base = OTHER; note = 2'-fluoro-modified nucleoside
  modified_base 7: mod_base = OTHER; note = 2'-O-methyl modified nucleoside
  modified_base 8: mod_base = OTHER; note = 2'-O-methyl modified nucleoside
  modified_base 9: mod_base = OTHER; note = 2'-fluoro-modified nucleoside
  modified_base 10: mod_base = OTHER; note = 2'-O-methyl modified nucleoside
  modified_base 11: mod_base = OTHER; note = 2'-fluoro-modified nucleoside
  modified_base 12: mod_base = OTHER; note = 2'-O-methyl modified nucleoside
  modified_base 13: mod_base = OTHER; note = 2'-O-methyl modified nucleoside
  modified_base 14: mod_base = OTHER; note = 2'-O-methyl modified nucleoside
  modified_base 15: mod_base = OTHER; note = 2'-O-methyl modified nucleoside
  modified_base 16: mod_base = OTHER; note = 2'-O-methyl modified nucleoside
  modified_base 17: mod_base = OTHER; note = 2'-O-methyl modified nucleoside
  modified_base 18: mod_base = OTHER; note = 2'-O-methyl modified nucleoside
  modified_base 19: mod_base = OTHER; note = 2'-O-methyl modified nucleoside with phosphorothioate linkage
  modified_base 20: mod_base = OTHER; note = 2'-O-methyl modified nucleoside with phosphorothioate linkage
  modified_base 21: mod_base = OTHER; note = 2'-O-methyl modified nucleoside
ataagggcatgtttgccaatt

SEQ ID NO: 12713 - RNA, 21 nt, synthetic construct
  source 1..21: mol_type = other RNA
  misc_feature 1: note = ETL17 moiety with a phosphorothioate linkage
  modified_base 1: mod_base = OTHER; note = 2'-O-methyl modified nucleoside
  modified_base 2: mod_base = OTHER; note = 2'-O-methyl modified nucleoside
  modified_base 3: mod_base = OTHER; note = 2'-O-methyl modified nucleoside
  modified_base 4: mod_base = OTHER; note = 2'-O-methyl modified nucleoside
  modified_base 5: mod_base = OTHER; note = 2'-O-methyl modified nucleoside
  modified_base 6: mod_base = OTHER; note = 2'-fluoro-modified nucleoside
  modified_base 7: mod_base = OTHER; note = 2'-O-methyl modified nucleoside
  modified_base 8: mod_base = OTHER; note = 2'-O-methyl modified nucleoside
  modified_base 9: mod_base = OTHER; note = 2'-fluoro-modified nucleoside
  modified_base 10: mod_base = OTHER; note = 2'-fluoro-modified nucleoside
  modified_base 11: mod_base = OTHER; note = 2'-O-methyl modified nucleoside
  modified_base 12: mod_base = OTHER; note = 2'-O-methyl modified nucleoside
  modified_base 13: mod_base = OTHER; note = 2'-O-methyl modified nucleoside
  modified_base 14: mod_base = OTHER; note = 2'-O-methyl modified nucleoside
  modified_base 15: mod_base = OTHER; note = 2'-O-methyl modified nucleoside
  modified_base 16: mod_base = OTHER; note = 2'-O-methyl modified nucleoside
  modified_base 17: mod_base = OTHER; note = 2'-O-methyl modified nucleoside
  modified_base 18: mod_base = OTHER; note = 2'-O-methyl modified nucleoside
  modified_base 19: mod_base = OTHER; note = 2'-O-methyl modified nucleoside with phosphorothioate linkage
  modified_base 20: mod_base = OTHER; note = 2'-O-methyl modified nucleoside with phosphorothioate linkage
  modified_base 21: mod_base = OTHER; note = 2'-O-methyl modified nucleoside
agctgcaactgagacgaaatt

SEQ ID NO: 12714 - RNA, 21 nt, synthetic construct
  source 1..21: mol_type = other RNA
  misc_feature 1: note = ETL17 moiety with a phosphorothioate linkage
  modified_base 1: mod_base = OTHER; note = 2'-O-methyl modified nucleoside
  modified_base 2: mod_base = OTHER; note = 2'-O-methyl modified nucleoside
  modified_base 3: mod_base = OTHER; note = 2'-O-methyl modified nucleoside
  modified_base 4: mod_base = OTHER; note = 2'-O-methyl modified nucleoside
  modified_base 5: mod_base = OTHER; note = 2'-fluoro-modified nucleoside
  modified_base 6: mod_base = OTHER; note = 2'-fluoro-modified nucleoside
  modified_base 7: mod_base = OTHER; note = 2'-O-methyl modified nucleoside
  modified_base 8: mod_base = OTHER; note = 2'-O-methyl modified nucleoside
  modified_base 9: mod_base = OTHER; note = 2'-fluoro-modified nucleoside
  modified_base 10: mod_base = OTHER; note = 2'-O-methyl modified nucleoside
  modified_base 11: mod_base = OTHER; note = 2'-fluoro-modified nucleoside
  modified_base 12: mod_base = OTHER; note = 2'-O-methyl modified nucleoside
  modified_base 13: mod_base = OTHER; note = 2'-O-methyl modified nucleoside
  modified_base 14: mod_base = OTHER; note = 2'-O-methyl modified nucleoside
  modified_base 15: mod_base = OTHER; note = 2'-O-methyl modified nucleoside
  modified_base 16: mod_base = OTHER; note = 2'-O-methyl modified nucleoside
  modified_base 17: mod_base = OTHER; note = 2'-O-methyl modified nucleoside
  modified_base 18: mod_base = OTHER; note = 2'-O-methyl modified nucleoside
  modified_base 19: mod_base = OTHER; note = 2'-O-methyl modified nucleoside with phosphorothioate linkage
  modified_base 20: mod_base = OTHER; note = 2'-O-methyl modified nucleoside with phosphorothioate linkage
  modified_base 21: mod_base = OTHER; note = 2'-O-methyl modified nucleoside
tctaccagttcatagatcatt

SEQ ID NO: 12715 - RNA, 21 nt, synthetic construct
  source 1..21: mol_type = other RNA
  misc_feature 1: note = ETL17 moiety with a phosphorothioate linkage
  modified_base 1: mod_base = OTHER; note = 2'-O-methyl modified nucleoside
  modified_base 2: mod_base = OTHER; note = 2'-O-methyl modified nucleoside
  modified_base 3: mod_base = OTHER; note = 2'-O-methyl modified nucleoside
  modified_base 4: mod_base = OTHER; note = 2'-O-methyl modified nucleoside
  modified_base 5: mod_base = OTHER; note = 2'-fluoro-modified nucleoside
  modified_base 6: mod_base = OTHER; note = 2'-O-methyl modified nucleoside
  modified_base 7: mod_base = OTHER; note = 2'-O-methyl modified nucleoside
  modified_base 8: mod_base = OTHER; note = 2'-fluoro-modified nucleoside
  modified_base 9: mod_base = OTHER; note = 2'-fluoro-modified nucleoside
  modified_base 10: mod_base = OTHER; note = 2'-O-methyl modified nucleoside
  modified_base 11: mod_base = OTHER; note = 2'-O-methyl modified nucleoside
  modified_base 12: mod_base = OTHER; note = 2'-O-methyl modified nucleoside
  modified_base 13: mod_base = OTHER; note = 2'-O-methyl modified nucleoside
  modified_base 14: mod_base = OTHER; note = 2'-O-methyl modified nucleoside
  modified_base 15: mod_base = OTHER; note = 2'-O-methyl modified nucleoside
  modified_base 16: mod_base = OTHER; note = 2'-O-methyl modified nucleoside
  modified_base 17: mod_base = OTHER; note = 2'-O-methyl modified nucleoside
  modified_base 18: mod_base = OTHER; note = 2'-O-methyl modified nucleoside
  modified_base 19: mod_base = OTHER; note = 2'-O-methyl modified nucleoside with phosphorothioate linkage
  modified_base 20: mod_base = OTHER; note = 2'-O-methyl modified nucleoside with phosphorothioate linkage
  modified_base 21: mod_base = OTHER; note = 2'-O-methyl modified nucleoside
ctaccagttcatagatccatt

SEQ ID NO: 12716 - RNA, 21 nt, synthetic construct
  source 1..21: mol_type = other RNA
  misc_feature 1: note = ETL17 moiety with a phosphorothioate linkage
  modified_base 1: mod_base = OTHER; note = 2'-O-methyl modified nucleoside
  modified_base 2: mod_base = OTHER; note = 2'-O-methyl modified nucleoside
  modified_base 3: mod_base = OTHER; note = 2'-O-methyl modified nucleoside
  modified_base 4: mod_base = OTHER; note = 2'-O-methyl modified nucleoside
  modified_base 5: mod_base = OTHER; note = 2'-fluoro-modified nucleoside
  modified_base 6: mod_base = OTHER; note = 2'-O-methyl modified nucleoside
  modified_base 7: mod_base = OTHER; note = 2'-O-methyl modified nucleoside
  modified_base 8: mod_base = OTHER; note = 2'-O-methyl modified nucleoside
  modified_base 9: mod_base = OTHER; note = 2'-fluoro-modified nucleoside
  modified_base 10: mod_base = OTHER; note = 2'-O-methyl modified nucleoside
  modified_base 11: mod_base = OTHER; note = 2'-fluoro-modified nucleoside
  modified_base 12: mod_base = OTHER; note = 2'-O-methyl modified nucleoside
  modified_base 13: mod_base = OTHER; note = 2'-O-methyl modified nucleoside
  modified_base 14: mod_base = OTHER; note = 2'-O-methyl modified nucleoside
  modified_base 15: mod_base = OTHER; note = 2'-O-methyl modified nucleoside
  modified_base 16: mod_base = OTHER; note = 2'-O-methyl modified nucleoside
  modified_base 17: mod_base = OTHER; note = 2'-O-methyl modified nucleoside
  modified_base 18: mod_base = OTHER; note = 2'-O-methyl modified nucleoside
  modified_base 19: mod_base = OTHER; note = 2'-O-methyl modified nucleoside with phosphorothioate linkage
  modified_base 20: mod_base = OTHER; note = 2'-O-methyl modified nucleoside with phosphorothioate linkage
  modified_base 21: mod_base = OTHER; note = 2'-O-methyl modified nucleoside
cttgatccataagcttggatt

SEQ ID NO: 12717 - RNA, 21 nt, synthetic construct
  source 1..21: mol_type = other RNA
  misc_feature 1: note = ETL17 moiety with a phosphorothioate linkage
  modified_base 1: mod_base = OTHER; note = 2'-O-methyl modified nucleoside
  modified_base 2: mod_base = OTHER; note = 2'-O-methyl modified nucleoside
  modified_base 3: mod_base = OTHER; note = 2'-O-methyl modified nucleoside
  modified_base 4: mod_base = OTHER; note = 2'-O-methyl modified nucleoside
  modified_base 5: mod_base = OTHER; note = 2'-fluoro-modified nucleoside
  modified_base 6: mod_base = OTHER; note = 2'-fluoro-modified nucleoside
  modified_base 7: mod_base = OTHER; note = 2'-O-methyl modified nucleoside
  modified_base 8: mod_base = OTHER; note = 2'-fluoro-modified nucleoside
  modified_base 9: mod_base = OTHER; note = 2'-fluoro-modified nucleoside
  modified_base 10: mod_base = OTHER; note = 2'-O-methyl modified nucleoside
  modified_base 11: mod_base = OTHER; note = 2'-fluoro-modified nucleoside
  modified_base 12: mod_base = OTHER; note = 2'-O-methyl modified nucleoside
  modified_base 13: mod_base = OTHER; note = 2'-O-methyl modified nucleoside
  modified_base 14: mod_base = OTHER; note = 2'-O-methyl modified nucleoside
  modified_base 15: mod_base = OTHER; note = 2'-O-methyl modified nucleoside
  modified_base 16: mod_base = OTHER; note = 2'-O-methyl modified nucleoside
  modified_base 17: mod_base = OTHER; note = 2'-O-methyl modified nucleoside
  modified_base 18: mod_base = OTHER; note = 2'-O-methyl modified nucleoside
  modified_base 19: mod_base = OTHER; note = 2'-O-methyl modified nucleoside with phosphorothioate linkage
  modified_base 20: mod_base = OTHER; note = 2'-O-methyl modified nucleoside with phosphorothioate linkage
  modified_base 21: mod_base = OTHER; note = 2'-O-methyl modified nucleoside
acggaaagatgttctctaatt

SEQ ID NO: 12718 - RNA, 21 nt, synthetic construct
  source 1..21: mol_type = other RNA
  misc_feature 1: note = ETL17 moiety with a phosphorothioate linkage
  modified_base 1: mod_base = OTHER; note = 2'-O-methyl modified nucleoside
  modified_base 2: mod_base = OTHER; note = 2'-O-methyl modified nucleoside
  modified_base 3: mod_base = OTHER; note = 2'-O-methyl modified nucleoside
  modified_base 4: mod_base = OTHER; note = 2'-O-methyl modified nucleoside
  modified_base 5: mod_base = OTHER; note = 2'-fluoro-modified nucleoside
  modified_base 6: mod_base = OTHER; note = 2'-O-methyl modified nucleoside
  modified_base 7: mod_base = OTHER; note = 2'-O-methyl modified nucleoside
  modified_base 8: mod_base = OTHER; note = 2'-O-methyl modified nucleoside
  modified_base 9: mod_base = OTHER; note = 2'-fluoro-modified nucleoside
  modified_base 10: mod_base = OTHER; note = 2'-O-methyl modified nucleoside
  modified_base 11: mod_base = OTHER; note = 2'-fluoro-modified nucleoside
  modified_base 12: mod_base = OTHER; note = 2'-O-methyl modified nucleoside
  modified_base 13: mod_base = OTHER; note = 2'-O-methyl modified nucleoside
  modified_base 14: mod_base = OTHER; note = 2'-O-methyl modified nucleoside
  modified_base 15: mod_base = OTHER; note = 2'-O-methyl modified nucleoside
  modified_base 16: mod_base = OTHER; note = 2'-O-methyl modified nucleoside
  modified_base 17: mod_base = OTHER; note = 2'-O-methyl modified nucleoside
  modified_base 18: mod_base = OTHER; note = 2'-O-methyl modified nucleoside
  modified_base 19: mod_base = OTHER; note = 2'-O-methyl modified nucleoside with phosphorothioate linkage
  modified_base 20: mod_base = OTHER; note = 2'-O-methyl modified nucleoside with phosphorothioate linkage
  modified_base 21: mod_base = OTHER; note = 2'-O-methyl modified nucleoside
tccatgggcatatagttgatt

SEQ ID NO: 12719 - RNA, 21 nt, synthetic construct
  source 1..21: mol_type = other RNA
  misc_feature 1: note = ETL17 moiety with a phosphorothioate linkage
  modified_base 1: mod_base = OTHER; note = 2'-O-methyl modified nucleoside
  modified_base 2: mod_base = OTHER; note = 2'-O-methyl modified nucleoside
  modified_base 3: mod_base = OTHER; note = 2'-O-methyl modified nucleoside
  modified_base 4: mod_base = OTHER; note = 2'-O-methyl modified nucleoside
  modified_base 5: mod_base = OTHER; note = 2'-fluoro-modified nucleoside
  modified_base 6: mod_base = OTHER; note = 2'-O-methyl modified nucleoside
  modified_base 7: mod_base = OTHER; note = 2'-O-methyl modified nucleoside
  modified_base 8: mod_base = OTHER; note = 2'-fluoro-modified nucleoside
  modified_base 9: mod_base = OTHER; note = 2'-fluoro-modified nucleoside
  modified_base 10: mod_base = OTHER; note = 2'-O-methyl modified nucleoside
  modified_base 11: mod_base = OTHER; note = 2'-O-methyl modified nucleoside
  modified_base 12: mod_base = OTHER; note = 2'-O-methyl modified nucleoside
  modified_base 13: mod_base = OTHER; note = 2'-O-methyl modified nucleoside
  modified_base 14: mod_base = OTHER; note = 2'-O-methyl modified nucleoside
  modified_base 15: mod_base = OTHER; note = 2'-O-methyl modified nucleoside
  modified_base 16: mod_base = OTHER; note = 2'-O-methyl modified nucleoside
  modified_base 17: mod_base = OTHER; note = 2'-O-methyl modified nucleoside
  modified_base 18: mod_base = OTHER; note = 2'-O-methyl modified nucleoside
  modified_base 19: mod_base = OTHER; note = 2'-O-methyl modified nucleoside with phosphorothioate linkage
  modified_base 20: mod_base = OTHER; note = 2'-O-methyl modified nucleoside with phosphorothioate linkage
  modified_base 21: mod_base = OTHER; note = 2'-O-methyl modified nucleoside
tatagttgaattacttcgatt

SEQ ID NO: 12720 - DNA, 21 bp, synthetic construct
  source 1..21: mol_type = other DNA
  misc_feature 1: note = ETL17 moiety with a phosphorothioate linkage
  modified_base 1: mod_base = OTHER; note = 2'-O-methyl modified nucleoside
  modified_base 2: mod_base = OTHER; note = 2'-O-methyl modified nucleoside
  modified_base 3: mod_base = OTHER; note = 2'-O-methyl modified nucleoside
  modified_base 4: mod_base = OTHER; note = 2'-O-methyl modified nucleoside
  modified_base 5: mod_base = OTHER; note = 2'-O-methyl modified nucleoside
  modified_base 6: mod_base = OTHER; note = 2'-fluoro-modified nucleoside
  modified_base 7: mod_base = OTHER; note = 2'-fluoro-modified nucleoside
  modified_base 8: mod_base = OTHER; note = 2'-fluoro-modified nucleoside
  modified_base 10: mod_base = OTHER; note = 2'-O-methyl modified nucleoside
  modified_base 11: mod_base = OTHER; note = 2'-O-methyl modified nucleoside
  modified_base 12: mod_base = OTHER; note = 2'-O-methyl modified nucleoside
  modified_base 13: mod_base = OTHER; note = 2'-O-methyl modified nucleoside
  modified_base 14: mod_base = OTHER; note = 2'-O-methyl modified nucleoside
  modified_base 15: mod_base = OTHER; note = 2'-O-methyl modified nucleoside
  modified_base 16: mod_base = OTHER; note = 2'-O-methyl modified nucleoside
  modified_base 17: mod_base = OTHER; note = 2'-O-methyl modified nucleoside
  modified_base 18: mod_base = OTHER; note = 2'-O-methyl modified nucleoside
  modified_base 19: mod_base = OTHER; note = 2'-O-methyl modified nucleoside with phosphorothioate linkage
  modified_base 20: mod_base = OTHER; note = 2'-O-methyl modified nucleoside with phosphorothioate linkage
  modified_base 21: mod_base = OTHER; note = 2'-O-methyl modified nucleoside
  misc_feature 1..8: note = RNA
  misc_feature 9: note = DNA
  misc_feature 10..21: note = RNA
atagttgaattacttcgaatt

SEQ ID NO: 12721 - RNA, 21 nt, synthetic construct
  source 1..21: mol_type = other RNA
  misc_feature 1: note = ETL17 moiety with a phosphorothioate linkage
  modified_base 1: mod_base = OTHER; note = 2'-O-methyl modified nucleoside
  modified_base 2: mod_base = OTHER; note = 2'-O-methyl modified nucleoside
  modified_base 3: mod_base = OTHER; note = 2'-O-methyl modified nucleoside
  modified_base 4: mod_base = OTHER; note = 2'-O-methyl modified nucleoside
  modified_base 5: mod_base = OTHER; note = 2'-O-methyl modified nucleoside
  modified_base 6: mod_base = OTHER; note = 2'-O-methyl modified nucleoside
  modified_base 7: mod_base = OTHER; note = 2'-O-methyl modified nucleoside
  modified_base 8: mod_base = OTHER; note = 2'-fluoro-modified nucleoside
  modified_base 9: mod_base = OTHER; note = 2'-fluoro-modified nucleoside
  modified_base 10: mod_base = OTHER; note = 2'-O-methyl modified nucleoside
  modified_base 11: mod_base = OTHER; note = 2'-fluoro-modified nucleoside
  modified_base 12: mod_base = OTHER; note = 2'-O-methyl modified nucleoside
  modified_base 13: mod_base = OTHER; note = 2'-O-methyl modified nucleoside
  modified_base 14: mod_base = OTHER; note = 2'-O-methyl modified nucleoside
  modified_base 15: mod_base = OTHER; note = 2'-O-methyl modified nucleoside
  modified_base 16: mod_base = OTHER; note = 2'-O-methyl modified nucleoside
  modified_base 17: mod_base = OTHER; note = 2'-O-methyl modified nucleoside
  modified_base 18: mod_base = OTHER; note = 2'-O-methyl modified nucleoside
  modified_base 19: mod_base = OTHER; note = 2'-O-methyl modified nucleoside with phosphorothioate linkage
  modified_base 20: mod_base = OTHER; note = 2'-O-methyl modified nucleoside with phosphorothioate linkage
  modified_base 21: mod_base = OTHER; note = 2'-O-methyl modified nucleoside
agttgaattacttcgacaatt

SEQ ID NO: 12722 - DNA, 21 bp, synthetic construct
  source 1..21: mol_type = other DNA
  misc_feature 1: note = ETL17 moiety with a phosphorothioate linkage
  modified_base 1: mod_base = OTHER; note = 2'-O-methyl modified nucleoside
  modified_base 2: mod_base = OTHER; note = 2'-O-methyl modified nucleoside
  modified_base 3: mod_base = OTHER; note = 2'-O-methyl modified nucleoside
  modified_base 4: mod_base = OTHER; note = 2'-O-methyl modified nucleoside
  modified_base 5: mod_base = OTHER; note = 2'-O-methyl modified nucleoside
  modified_base 6: mod_base = OTHER; note = 2'-fluoro-modified nucleoside
  modified_base 7: mod_base = OTHER; note = 2'-fluoro-modified nucleoside
  modified_base 8: mod_base = OTHER; note = 2'-fluoro-modified nucleoside
  modified_base 10: mod_base = OTHER; note = 2'-O-methyl modified nucleoside
  modified_base 11: mod_base = OTHER; note = 2'-O-methyl modified nucleoside
  modified_base 12: mod_base = OTHER; note = 2'-O-methyl modified nucleoside
  modified_base 13: mod_base = OTHER; note = 2'-O-methyl modified nucleoside
  modified_base 14: mod_base = OTHER; note = 2'-O-methyl modified nucleoside
  modified_base 15: mod_base = OTHER; note = 2'-O-methyl modified nucleoside
  modified_base 16: mod_base = OTHER; note = 2'-O-methyl modified nucleoside
  modified_base 17: mod_base = OTHER; note = 2'-O-methyl modified nucleoside
  modified_base 18: mod_base = OTHER; note = 2'-O-methyl modified nucleoside
  modified_base 19: mod_base = OTHER; note = 2'-O-methyl modified nucleoside with phosphorothioate linkage
  modified_base 20: mod_base = OTHER; note = 2'-O-methyl modified nucleoside with phosphorothioate linkage
  modified_base 21: mod_base = OTHER; note = 2'-O-methyl modified nucleoside
  misc_feature 1..8: note = RNA
  misc_feature 9: note = DNA
  misc_feature 10..21: note = RNA
ttcgacagcagcaattctatt

SEQ ID NO: 12723 - DNA, 21 bp, synthetic construct
  source 1..21: mol_type = other DNA
  misc_feature 1: note = ETL17 moiety with a phosphorothioate linkage
  modified_base 1: mod_base = OTHER; note = 2'-O-methyl modified nucleoside
  modified_base 2: mod_base = OTHER; note = 2'-O-methyl modified nucleoside
  modified_base 3: mod_base = OTHER; note = 2'-O-methyl modified nucleoside
  modified_base 4: mod_base = OTHER; note = 2'-O-methyl modified nucleoside
  modified_base 5: mod_base = OTHER; note = 2'-O-methyl modified nucleoside
  modified_base 6: mod_base = OTHER; note = 2'-fluoro-modified nucleoside
  modified_base 7: mod_base = OTHER; note = 2'-fluoro-modified nucleoside
  modified_base 8: mod_base = OTHER; note = 2'-fluoro-modified nucleoside
  modified_base 10: mod_base = OTHER; note = 2'-O-methyl modified nucleoside
  modified_base 11: mod_base = OTHER; note = 2'-O-methyl modified nucleoside
  modified_base 12: mod_base = OTHER; note = 2'-O-methyl modified nucleoside
  modified_base 13: mod_base = OTHER; note = 2'-O-methyl modified nucleoside
  modified_base 14: mod_base = OTHER; note = 2'-O-methyl modified nucleoside
  modified_base 15: mod_base = OTHER; note = 2'-O-methyl modified nucleoside
  modified_base 16: mod_base = OTHER; note = 2'-O-methyl modified nucleoside
  modified_base 17: mod_base = OTHER; note = 2'-O-methyl modified nucleoside
  modified_base 18: mod_base = OTHER; note = 2'-O-methyl modified nucleoside
  modified_base 19: mod_base = OTHER; note = 2'-O-methyl modified nucleoside with phosphorothioate linkage
  modified_base 20: mod_base = OTHER; note = 2'-O-methyl modified nucleoside with phosphorothioate linkage
  modified_base 21: mod_base = OTHER; note = 2'-O-methyl modified nucleoside
  misc_feature 1..8: note = RNA
  misc_feature 9: note = DNA
  misc_feature 10..21: note = RNA
agttgtggtagatactctatt

SEQ ID NO: 12724 - RNA, 21 nt, synthetic construct
  source 1..21: mol_type = other RNA
  misc_feature 1: note = ETL17 moiety with a phosphorothioate linkage
  modified_base 1: mod_base = OTHER; note = 2'-O-methyl modified nucleoside
  modified_base 2: mod_base = OTHER; note = 2'-O-methyl modified nucleoside
  modified_base 3: mod_base = OTHER; note = 2'-O-methyl modified nucleoside
  modified_base 4: mod_base = OTHER; note = 2'-O-methyl modified nucleoside
  modified_base 5: mod_base = OTHER; note = 2'-O-methyl modified nucleoside
  modified_base 6: mod_base = OTHER; note = 2'-fluoro-modified nucleoside
  modified_base 7: mod_base = OTHER; note = 2'-fluoro-modified nucleoside
  modified_base 8: mod_base = OTHER; note = 2'-O-methyl modified nucleoside
  modified_base 9: mod_base = OTHER; note = 2'-fluoro-modified nucleoside
  modified_base 10: mod_base = OTHER; note = 2'-fluoro-modified nucleoside
  modified_base 11: mod_base = OTHER; note = 2'-O-methyl modified nucleoside
  modified_base 12: mod_base = OTHER; note = 2'-O-methyl modified nucleoside
  modified_base 13: mod_base = OTHER; note = 2'-O-methyl modified nucleoside
  modified_base 14: mod_base = OTHER; note = 2'-O-methyl modified nucleoside
  modified_base 15: mod_base = OTHER; note = 2'-O-methyl modified nucleoside
  modified_base 16: mod_base = OTHER; note = 2'-O-methyl modified nucleoside
  modified_base 17: mod_base = OTHER; note = 2'-O-methyl modified nucleoside
  modified_base 18: mod_base = OTHER; note = 2'-O-methyl modified nucleoside
  modified_base 19: mod_base = OTHER; note = 2'-O-methyl modified nucleoside with phosphorothioate linkage
  modified_base 20: mod_base = OTHER; note = 2'-O-methyl modified nucleoside with phosphorothioate linkage
  modified_base 21: mod_base = OTHER; note = 2'-O-methyl modified nucleoside
tggaatctcctatgatcgatt

SEQ ID NO: 12725 - RNA, 21 nt, synthetic construct
  source 1..21: mol_type = other RNA
  misc_feature 1: note = ETL17 moiety with a phosphorothioate linkage
  modified_base 1: mod_base = OTHER; note = 2'-O-methyl modified nucleoside
  modified_base 2: mod_base = OTHER; note = 2'-O-methyl modified nucleoside
  modified_base 3: mod_base = OTHER; note = 2'-O-methyl modified nucleoside
  modified_base 4: mod_base = OTHER; note = 2'-O-methyl modified nucleoside
  modified_base 5: mod_base = OTHER; note = 2'-O-methyl modified nucleoside
  modified_base 6: mod_base = OTHER; note = 2'-O-methyl modified nucleoside
  modified_base 7: mod_base = OTHER; note = 2'-O-methyl modified nucleoside
  modified_base 8: mod_base = OTHER; note = 2'-fluoro-modified nucleoside
  modified_base 9: mod_base = OTHER; note = 2'-fluoro-modified nucleoside
  modified_base 10: mod_base = OTHER; note = 2'-O-methyl modified nucleoside
  modified_base 11: mod_base = OTHER; note = 2'-fluoro-modified nucleoside
  modified_base 12: mod_base = OTHER; note = 2'-O-methyl modified nucleoside
  modified_base 13: mod_base = OTHER; note = 2'-O-methyl modified nucleoside
  modified_base 14: mod_base = OTHER; note = 2'-O-methyl modified nucleoside
  modified_base 15: mod_base = OTHER; note = 2'-O-methyl modified nucleoside
  modified_base 16: mod_base = OTHER; note = 2'-O-methyl modified nucleoside
  modified_base 17: mod_base = OTHER; note = 2'-O-methyl modified nucleoside
  modified_base 18: mod_base = OTHER; note = 2'-O-methyl modified nucleoside
  modified_base 19: mod_base = OTHER; note = 2'-O-methyl modified nucleoside with phosphorothioate linkage
  modified_base 20: mod_base = OTHER; note = 2'-O-methyl modified nucleoside with phosphorothioate linkage
  modified_base 21: mod_base = OTHER; note = 2'-O-methyl modified nucleoside
tcgaaggtcactacaatgatt

SEQ ID NO: 12726 - RNA, 21 nt, synthetic construct
  source 1..21: mol_type = other RNA
  misc_feature 1: note = ETL17 moiety with a phosphorothioate linkage
  modified_base 1: mod_base = OTHER; note = 2'-O-methyl modified nucleoside
  modified_base 2: mod_base = OTHER; note = 2'-O-methyl modified nucleoside
  modified_base 3: mod_base = OTHER; note = 2'-O-methyl modified nucleoside
  modified_base 4: mod_base = OTHER; note = 2'-O-methyl modified nucleoside
  modified_base 5: mod_base = OTHER; note = 2'-fluoro-modified nucleoside
  modified_base 6: mod_base = OTHER; note = 2'-O-methyl modified nucleoside
  modified_base 7: mod_base = OTHER; note = 2'-O-methyl modified nucleoside
  modified_base 8: mod_base = OTHER; note = 2'-fluoro-modified nucleoside
  modified_base 9: mod_base = OTHER; note = 2'-fluoro-modified nucleoside
  modified_base 10: mod_base = OTHER; note = 2'-O-methyl modified nucleoside
  modified_base 11: mod_base = OTHER; note = 2'-fluoro-modified nucleoside
  modified_base 12: mod_base = OTHER; note = 2'-O-methyl modified nucleoside
  modified_base 13: mod_base = OTHER; note = 2'-O-methyl modified nucleoside
  modified_base 14: mod_base = OTHER; note = 2'-O-methyl modified nucleoside
  modified_base 15: mod_base = OTHER; note = 2'-O-methyl modified nucleoside
  modified_base 16: mod_base = OTHER; note = 2'-O-methyl modified nucleoside
  modified_base 17: mod_base = OTHER; note = 2'-O-methyl modified nucleoside
  modified_base 18: mod_base = OTHER; note = 2'-O-methyl modified nucleoside
  modified_base 19: mod_base = OTHER; note = 2'-O-methyl modified nucleoside with phosphorothioate linkage
  modified_base 20: mod_base = OTHER; note = 2'-O-methyl modified nucleoside with phosphorothioate linkage
  modified_base 21: mod_base = OTHER; note = 2'-O-methyl modified nucleoside
tgttattagaatgttacgatt

SEQ ID NO: 12727 - RNA, 21 nt, synthetic construct
  source 1..21: mol_type = other RNA
  misc_feature 1: note = ETL17 moiety with a phosphorothioate linkage
  modified_base 1: mod_base = OTHER; note = 2'-O-methyl modified nucleoside
  modified_base 2: mod_base = OTHER; note = 2'-O-methyl modified nucleoside
  modified_base 3: mod_base = OTHER; note = 2'-O-methyl modified nucleoside
  modified_base 4: mod_base = OTHER; note = 2'-O-methyl modified nucleoside
  modified_base 5: mod_base = OTHER; note = 2'-O-methyl modified nucleoside
  modified_base 6: mod_base = OTHER; note = 2'-fluoro-modified nucleoside
  modified_base 7: mod_base = OTHER; note = 2'-O-methyl modified nucleoside
  modified_base 8: mod_base = OTHER; note = 2'-fluoro-modified nucleoside
  modified_base 9: mod_base = OTHER; note = 2'-fluoro-modified nucleoside
  modified_base 10: mod_base = OTHER; note = 2'-O-methyl modified nucleoside
  modified_base 11: mod_base = OTHER; note = 2'-O-methyl modified nucleoside
  modified_base 12: mod_base = OTHER; note = 2'-O-methyl modified nucleoside
  modified_base 13: mod_base = OTHER; note = 2'-O-methyl modified nucleoside
  modified_base 14: mod_base = OTHER; note = 2'-O-methyl modified nucleoside
  modified_base 15: mod_base = OTHER; note = 2'-O-methyl modified nucleoside
  modified_base 16: mod_base = OTHER; note = 2'-O-methyl modified nucleoside
  modified_base 17: mod_base = OTHER; note = 2'-O-methyl modified nucleoside
  modified_base 18: mod_base = OTHER; note = 2'-O-methyl modified nucleoside
  modified_base 19: mod_base = OTHER; note = 2'-O-methyl modified nucleoside with phosphorothioate linkage
  modified_base 20: mod_base = OTHER; note = 2'-O-methyl modified nucleoside with phosphorothioate linkage
  modified_base 21: mod_base = OTHER; note = 2'-O-methyl modified nucleoside
aaactatggttgtgtccgatt

SEQ ID NO: 12728 - RNA, 21 nt, synthetic construct
  source 1..21: mol_type = other RNA
  misc_feature 1: note = ETL17 moiety with a phosphorothioate linkage
  modified_base 1: mod_base = OTHER; note = 2'-O-methyl modified nucleoside
  modified_base 2: mod_base = OTHER; note = 2'-O-methyl modified nucleoside
  modified_base 3: mod_base = OTHER; note = 2'-O-methyl modified nucleoside
  modified_base 4: mod_base = OTHER; note = 2'-O-methyl modified nucleoside
  modified_base 5: mod_base = OTHER; note = 2'-O-methyl modified nucleoside
  modified_base 6: mod_base = OTHER; note = 2'-fluoro-modified nucleoside
  modified_base 7: mod_base = OTHER; note = 2'-fluoro-modified nucleoside
  modified_base 8: mod_base = OTHER; note = 2'-O-methyl modified nucleoside
  modified_base 9: mod_base = OTHER; note = 2'-fluoro-modified nucleoside
  modified_base 10: mod_base = OTHER; note = 2'-fluoro-modified nucleoside
  modified_base 11: mod_base = OTHER; note = 2'-O-methyl modified nucleoside
  modified_base 12: mod_base = OTHER; note = 2'-O-methyl modified nucleoside
  modified_base 13: mod_base = OTHER; note = 2'-O-methyl modified nucleoside
  modified_base 14: mod_base = OTHER; note = 2'-O-methyl modified nucleoside
  modified_base 15: mod_base = OTHER; note = 2'-O-methyl modified nucleoside
  modified_base 16: mod_base = OTHER; note = 2'-O-methyl modified nucleoside
  modified_base 17: mod_base = OTHER; note = 2'-O-methyl modified nucleoside
  modified_base 18: mod_base = OTHER; note = 2'-O-methyl modified nucleoside
  modified_base 19: mod_base = OTHER; note = 2'-O-methyl modified nucleoside with phosphorothioate linkage
  modified_base 20: mod_base = OTHER; note = 2'-O-methyl modified nucleoside with phosphorothioate linkage
  modified_base 21: mod_base = OTHER; note = 2'-O-methyl modified nucleoside
aagcgttgttaccagctaatt

SEQ ID NO: 12729 - DNA, 21 bp, synthetic construct
  source 1..21: mol_type = other DNA
  misc_feature 1: note = ETL17 moiety with a phosphorothioate linkage
  modified_base 1: mod_base = OTHER; note = 2'-O-methyl modified nucleoside
  modified_base 2: mod_base = OTHER; note = 2'-O-methyl modified nucleoside
  modified_base 3: mod_base = OTHER; note = 2'-O-methyl modified nucleoside
  modified_base 4: mod_base = OTHER; note = 2'-O-methyl modified nucleoside
  modified_base 5: mod_base = OTHER; note = 2'-O-methyl modified nucleoside
  modified_base 6: mod_base = OTHER; note = 2'-fluoro-modified nucleoside
  modified_base 7: mod_base = OTHER; note = 2'-fluoro-modified nucleoside
  modified_base 8: mod_base = OTHER; note = 2'-fluoro-modified nucleoside
  modified_base 10: mod_base = OTHER; note = 2'-O-methyl modified nucleoside
  modified_base 11: mod_base = OTHER; note = 2'-O-methyl modified nucleoside
  modified_base 12: mod_base = OTHER; note = 2'-O-methyl modified nucleoside
  modified_base 13: mod_base = OTHER; note = 2'-O-methyl modified nucleoside
  modified_base 14: mod_base = OTHER; note = 2'-O-methyl modified nucleoside
  modified_base 15: mod_base = OTHER; note = 2'-O-methyl modified nucleoside
  modified_base 16: mod_base = OTHER; note = 2'-O-methyl modified nucleoside
  modified_base 17: mod_base = OTHER; note = 2'-O-methyl modified nucleoside
  modified_base 18: mod_base = OTHER; note = 2'-O-methyl modified nucleoside
  modified_base 19: mod_base = OTHER; note = 2'-O-methyl modified nucleoside with phosphorothioate linkage
  modified_base 20: mod_base = OTHER; note = 2'-O-methyl modified nucleoside with phosphorothioate linkage
  modified_base 21: mod_base = OTHER; note = 2'-O-methyl modified nucleoside
  misc_feature 1..8: note = RNA
  misc_feature 9: note = DNA
  misc_feature 10..21: note = RNA
tattcactgctagcaagtatt

SEQ ID NO: 12730 - RNA, 21 nt, synthetic construct
  source 1..21: mol_type = other RNA
  misc_feature 1: note = ETL17 moiety with a phosphorothioate linkage
  modified_base 1: mod_base = OTHER; note = 2'-O-methyl modified nucleoside
  modified_base 2: mod_base = OTHER; note = 2'-O-methyl modified nucleoside
  modified_base 3: mod_base = OTHER; note = 2'-O-methyl modified nucleoside
  modified_base 4: mod_base = OTHER; note = 2'-O-methyl modified nucleoside
  modified_base 5: mod_base = OTHER; note = 2'-O-methyl modified nucleoside
  modified_base 6: mod_base = OTHER; note = 2'-fluoro-modified nucleoside
  modified_base 7: mod_base = OTHER; note = 2'-fluoro-modified nucleoside
  modified_base 8: mod_base = OTHER; note = 2'-O-methyl modified nucleoside
  modified_base 9: mod_base = OTHER; note = 2'-fluoro-modified nucleoside
  modified_base 10: mod_base = OTHER; note = 2'-fluoro-modified nucleoside
  modified_base 11: mod_base = OTHER; note = 2'-O-methyl modified nucleoside
  modified_base 12: mod_base = OTHER; note = 2'-O-methyl modified nucleoside
  modified_base 13: mod_base = OTHER; note = 2'-O-methyl modified nucleoside
  modified_base 14: mod_base = OTHER; note = 2'-O-methyl modified nucleoside
  modified_base 15: mod_base = OTHER; note = 2'-O-methyl modified nucleoside
  modified_base 16: mod_base = OTHER; note = 2'-O-methyl modified nucleoside
  modified_base 17: mod_base = OTHER; note = 2'-O-methyl modified nucleoside
  modified_base 18: mod_base = OTHER; note = 2'-O-methyl modified nucleoside
  modified_base 19: mod_base = OTHER; note = 2'-O-methyl modified nucleoside with phosphorothioate linkage
  modified_base 20: mod_base = OTHER; note = 2'-O-methyl modified nucleoside with phosphorothioate linkage
  modified_base 21: mod_base = OTHER; note = 2'-O-methyl modified nucleoside
attcactgctagcaagtcatt

SEQ ID NO: 12731 - RNA, 21 nt, synthetic construct
  source 1..21: mol_type = other RNA
  misc_feature 1: note = ETL17 moiety with a phosphorothioate linkage
  modified_base 1: mod_base = OTHER; note = 2'-O-methyl modified nucleoside
  modified_base 2: mod_base = OTHER; note = 2'-O-methyl modified nucleoside
  modified_base 3: mod_base = OTHER; note = 2'-O-methyl modified nucleoside
  modified_base 4: mod_base = OTHER; note = 2'-O-methyl modified nucleoside
  modified_base 5: mod_base = OTHER; note = 2'-fluoro-modified nucleoside
  modified_base 6: mod_base = OTHER; note = 2'-O-methyl modified nucleoside
  modified_base 7: mod_base = OTHER; note = 2'-O-methyl modified nucleoside
  modified_base 8: mod_base = OTHER; note = 2'-O-methyl modified nucleoside
  modified_base 9: mod_base = OTHER; note = 2'-fluoro-modified nucleoside
  modified_base 10: mod_base = OTHER; note = 2'-O-methyl modified nucleoside
  modified_base 11: mod_base = OTHER; note = 2'-fluoro-modified nucleoside
  modified_base 12: mod_base = OTHER; note = 2'-O-methyl modified nucleoside
  modified_base 13: mod_base = OTHER; note = 2'-O-methyl modified nucleoside
  modified_base 14: mod_base = OTHER; note = 2'-O-methyl modified nucleoside
  modified_base 15: mod_base = OTHER; note = 2'-O-methyl modified nucleoside
  modified_base 16: mod_base = OTHER; note = 2'-O-methyl modified nucleoside
  modified_base 17: mod_base = OTHER; note = 2'-O-methyl modified nucleoside
  modified_base 18: mod_base = OTHER; note = 2'-O-methyl modified nucleoside
  modified_base 19: mod_base = OTHER; note = 2'-O-methyl modified nucleoside with phosphorothioate linkage
  modified_base 20: mod_base = OTHER; note = 2'-O-methyl modified nucleoside with phosphorothioate linkage
  modified_base 21: mod_base = OTHER; note = 2'-O-methyl modified nucleoside
ttatgtccacacacattgatt

SEQ ID NO: 12732 - RNA, 21 nt, synthetic construct
  source 1..21: mol_type = other RNA
  misc_feature 1: note = ETL17 moiety with a phosphorothioate linkage
  modified_base 1: mod_base = OTHER; note = 2'-O-methyl modified nucleoside
  modified_base 2: mod_base = OTHER; note = 2'-O-methyl modified nucleoside
  modified_base 3: mod_base = OTHER; note = 2'-O-methyl modified nucleoside
  modified_base 4: mod_base = OTHER; note = 2'-O-methyl modified nucleoside
  modified_base 5: mod_base = OTHER; note = 2'-fluoro-modified nucleoside
  modified_base 6: mod_base = OTHER; note = 2'-fluoro-modified nucleoside
  modified_base 7: mod_base = OTHER; note = 2'-O-methyl modified nucleoside
  modified_base 8: mod_base = OTHER; note = 2'-fluoro-modified nucleoside
  modified_base 9: mod_base = OTHER; note = 2'-fluoro-modified nucleoside
  modified_base 10: mod_base = OTHER; note = 2'-O-methyl modified nucleoside
  modified_base 11: mod_base = OTHER; note = 2'-fluoro-modified nucleoside
  modified_base 12: mod_base = OTHER; note = 2'-O-methyl modified nucleoside
  modified_base 13: mod_base = OTHER; note = 2'-O-methyl modified nucleoside
  modified_base 14: mod_base = OTHER; note = 2'-O-methyl modified nucleoside
  modified_base 15: mod_base = OTHER; note = 2'-O-methyl modified nucleoside
  modified_base 16: mod_base = OTHER; note = 2'-O-methyl modified nucleoside
  modified_base 17: mod_base = OTHER; note = 2'-O-methyl modified nucleoside
  modified_base 18: mod_base = OTHER; note = 2'-O-methyl modified nucleoside
  modified_base 19: mod_base = OTHER; note = 2'-O-methyl modified nucleoside with phosphorothioate linkage
  modified_base 20: mod_base = OTHER; note = 2'-O-methyl modified nucleoside with phosphorothioate linkage
  modified_base 21: mod_base = OTHER; note = 2'-O-methyl modified nucleoside
aacagaaagaaatgttgcatt

SEQ ID NO: 12733 - RNA, 21 nt, synthetic construct
  source 1..21: mol_type = other RNA
  misc_feature 1: note = ETL17 moiety with a phosphorothioate linkage
  modified_base 1: mod_base = OTHER; note = 2'-O-methyl modified nucleoside
  modified_base 2: mod_base = OTHER; note = 2'-O-methyl modified nucleoside
  modified_base 3: mod_base = OTHER; note = 2'-O-methyl modified nucleoside
  modified_base 4: mod_base = OTHER; note = 2'-O-methyl modified nucleoside
  modified_base 5: mod_base = OTHER; note = 2'-O-methyl modified nucleoside
  modified_base 6: mod_base = OTHER; note = 2'-fluoro-modified nucleoside
  modified_base 7: mod_base = OTHER; note = 2'-fluoro-modified nucleoside
  modified_base 8: mod_base = OTHER; note = 2'-fluoro-modified nucleoside
  modified_base 9: mod_base = OTHER; note = 2'-fluoro-modified nucleoside
  modified_base 10: mod_base = OTHER; note = 2'-O-methyl modified nucleoside
  modified_base 11: mod_base = OTHER; note = 2'-O-methyl modified nucleoside
  modified_base 12: mod_base = OTHER; note = 2'-O-methyl modified nucleoside
  modified_base 13: mod_base = OTHER; note = 2'-O-methyl modified nucleoside
  modified_base 14: mod_base = OTHER; note = 2'-O-methyl modified nucleoside
  modified_base 15: mod_base = OTHER; note = 2'-O-methyl modified nucleoside
  modified_base 16: mod_base = OTHER; note = 2'-O-methyl modified nucleoside
  modified_base 17: mod_base = OTHER; note = 2'-O-methyl modified nucleoside
  modified_base 18: mod_base = OTHER; note = 2'-O-methyl modified nucleoside
  modified_base 19: mod_base = OTHER; note = 2'-O-methyl modified nucleoside with phosphorothioate linkage
  modified_base 20: mod_base = OTHER; note = 2'-O-methyl modified nucleoside with phosphorothioate linkage
  modified_base 21: mod_base = OTHER; note = 2'-O-methyl modified nucleoside
atatattctgagttttgtatt

SEQ ID NO: 12734 - RNA, 21 nt, synthetic construct
  source 1..21: mol_type = other RNA
  modified_base 1: mod_base = OTHER; note = 2'-O-methyl modified nucleoside with phosphorothioate linkage
  modified_base 2: mod_base = OTHER; note = 2'-fluoro-modified nucleoside with phosphorothioate linkage
  modified_base 3: mod_base = OTHER; note = 2'-O-methyl modified nucleoside
  modified_base 4: mod_base = OTHER; note = 2'-fluoro-modified nucleoside
  modified_base 5: mod_base = OTHER; note = 2'-O-methyl modified nucleoside
  modified_base 6: mod_base = OTHER; note = 2'-fluoro-modified nucleoside
  modified_base 7: mod_base = OTHER; note = 2'-O-methyl modified nucleoside
  modified_base 8: mod_base = OTHER; note = 2'-fluoro-modified nucleoside
  modified_base 9: mod_base = OTHER; note = 2'-O-methyl modified nucleoside
  modified_base 10: mod_base = OTHER; note = 2'-fluoro-modified nucleoside
  modified_base 11: mod_base = OTHER; note = 2'-O-methyl modified nucleoside
  modified_base 12: mod_base = OTHER; note = 2'-fluoro-modified nucleoside
  modified_base 13: mod_base = OTHER; note = 2'-O-methyl modified nucleoside
  modified_base 14: mod_base = OTHER; note = 2'-fluoro-modified nucleoside
  modified_base 15: mod_base = OTHER; note = 2'-O-methyl modified nucleoside
  modified_base 16: mod_base = OTHER; note = 2'-fluoro-modified nucleoside
  modified_base 17: mod_base = OTHER; note = 2'-O-methyl modified nucleoside
  modified_base 18: mod_base = OTHER; note = 2'-fluoro-modified nucleoside
  modified_base 19: mod_base = OTHER; note = 2'-O-methyl modified nucleoside with phosphorothioate linkage
  modified_base 20: mod_base = OTHER; note = 2'-O-methyl modified nucleoside with phosphorothioate linkage
  modified_base 21: mod_base = OTHER; note = 2'-O-methyl modified nucleoside
tccaacactgtattctgattt

SEQ ID NO: 12735 - RNA, 21 nt, synthetic construct
  source 1..21: mol_type = other RNA
  modified_base 1: mod_base = OTHER; note = 2'-O-methyl modified nucleoside with phosphorothioate linkage
  modified_base 2: mod_base = OTHER; note = 2'-fluoro-modified nucleoside with phosphorothioate linkage
  modified_base 3: mod_base = OTHER; note = 2'-O-methyl modified nucleoside
  modified_base 4: mod_base = OTHER; note = 2'-fluoro-modified nucleoside
  modified_base 5: mod_base = OTHER; note = 2'-O-methyl modified nucleoside
  modified_base 6: mod_base = OTHER; note = 2'-fluoro-modified nucleoside
  modified_base 7: mod_base = OTHER; note = 2'-O-methyl modified nucleoside
  modified_base 8: mod_base = OTHER; note = 2'-fluoro-modified nucleoside
  modified_base 9: mod_base = OTHER; note = 2'-O-methyl modified nucleoside
  modified_base 10: mod_base = OTHER; note = 2'-fluoro-modified nucleoside
  modified_base 11: mod_base = OTHER; note = 2'-O-methyl modified nucleoside
  modified_base 12: mod_base = OTHER; note = 2'-fluoro-modified nucleoside
  modified_base 13: mod_base = OTHER; note = 2'-O-methyl modified nucleoside
  modified_base 14: mod_base = OTHER; note = 2'-fluoro-modified nucleoside
  modified_base 15: mod_base = OTHER; note = 2'-O-methyl modified nucleoside
  modified_base 16: mod_base = OTHER; note = 2'-fluoro-modified nucleoside
  modified_base 17: mod_base = OTHER; note = 2'-O-methyl modified nucleoside
  modified_base 18: mod_base = OTHER; note = 2'-fluoro-modified nucleoside
  modified_base 19: mod_base = OTHER; note = 2'-O-methyl modified nucleoside with phosphorothioate linkage
  modified_base 20: mod_base = OTHER; note = 2'-O-methyl modified nucleoside with phosphorothioate linkage
  modified_base 21: mod_base = OTHER; note = 2'-O-methyl modified nucleoside
ttcgaccaacactgtattctt

SEQ ID NO: 12736 - RNA, 21 nt, synthetic construct
  source 1..21: mol_type = other RNA
  modified_base 1: mod_base = OTHER; note = 2'-O-methyl modified nucleoside with phosphorothioate linkage
  modified_base 2: mod_base = OTHER; note = 2'-fluoro-modified nucleoside with phosphorothioate linkage
  modified_base 3: mod_base = OTHER; note = 2'-O-methyl modified nucleoside
  modified_base 4: mod_base = OTHER; note = 2'-fluoro-modified nucleoside
  modified_base 5: mod_base = OTHER; note = 2'-O-methyl modified nucleoside
  modified_base 6: mod_base = OTHER; note = 2'-fluoro-modified nucleoside
  modified_base 7: mod_base = OTHER; note = 2'-O-methyl modified nucleoside
  modified_base 8: mod_base = OTHER; note = 2'-fluoro-modified nucleoside
  modified_base 9: mod_base = OTHER; note = 2'-O-methyl modified nucleoside
  modified_base 10: mod_base = OTHER; note = 2'-fluoro-modified nucleoside
  modified_base 11: mod_base = OTHER; note = 2'-O-methyl modified nucleoside
  modified_base 12: mod_base = OTHER; note = 2'-fluoro-modified nucleoside
  modified_base 13: mod_base = OTHER; note = 2'-O-methyl modified nucleoside
  modified_base 14: mod_base = OTHER; note = 2'-fluoro-modified nucleoside
  modified_base 15: mod_base = OTHER; note = 2'-O-methyl modified nucleoside
  modified_base 16: mod_base = OTHER; note = 2'-fluoro-modified nucleoside
  modified_base 17: mod_base = OTHER; note = 2'-O-methyl modified nucleoside
  modified_base 18: mod_base = OTHER; note = 2'-fluoro-modified nucleoside
  modified_base 19: mod_base = OTHER; note = 2'-O-methyl modified nucleoside with phosphorothioate linkage
  modified_base 20: mod_base = OTHER; note = 2'-O-methyl modified nucleoside with phosphorothioate linkage
  modified_base 21: mod_base = OTHER; note = 2'-O-methyl modified nucleoside
tcattccgcaaacccaaagtt

SEQ ID NO: 12737 - RNA, 21 nt, synthetic construct
  source 1..21: mol_type = other RNA
  modified_base 1: mod_base = OTHER; note = 2'-O-methyl modified nucleoside with phosphorothioate linkage
  modified_base 2: mod_base = OTHER; note = 2'-fluoro-modified nucleoside with phosphorothioate linkage
  modified_base 3: mod_base = OTHER; note = 2'-O-methyl modified nucleoside
  modified_base 4: mod_base = OTHER; note = 2'-fluoro-modified nucleoside
  modified_base 5: mod_base = OTHER; note = 2'-O-methyl modified nucleoside
  modified_base 6: mod_base = OTHER; note = 2'-fluoro-modified nucleoside
  modified_base 7: mod_base = OTHER; note = 2'-O-methyl modified nucleoside
  modified_base 8: mod_base = OTHER; note = 2'-fluoro-modified nucleoside
  modified_base 9: mod_base = OTHER; note = 2'-O-methyl modified nucleoside
  modified_base 10: mod_base = OTHER; note = 2'-fluoro-modified nucleoside
  modified_base 11: mod_base = OTHER; note = 2'-O-methyl modified nucleoside
  modified_base 12: mod_base = OTHER; note = 2'-fluoro-modified nucleoside
  modified_base 13: mod_base = OTHER; note = 2'-O-methyl modified nucleoside
  modified_base 14: mod_base = OTHER; note = 2'-fluoro-modified nucleoside
  modified_base 15: mod_base = OTHER; note = 2'-O-methyl modified nucleoside
  modified_base 16: mod_base = OTHER; note = 2'-fluoro-modified nucleoside
  modified_base 17: mod_base = OTHER; note = 2'-O-methyl modified nucleoside
  modified_base 18: mod_base = OTHER; note = 2'-fluoro-modified nucleoside
  modified_base 19: mod_base = OTHER; note = 2'-O-methyl modified nucleoside with phosphorothioate linkage
  modified_base 20: mod_base = OTHER; note = 2'-O-methyl modified nucleoside with phosphorothioate linkage
  modified_base 21: mod_base = OTHER; note = 2'-O-methyl modified nucleoside
ttggcaaacatgcccttattt

SEQ ID NO: 12738 - RNA, 21 nt, synthetic construct
  source 1..21: mol_type = other RNA
  modified_base 1: mod_base = OTHER; note = 2'-O-methyl modified nucleoside with phosphorothioate linkage
  modified_base 2: mod_base = OTHER; note = 2'-fluoro-modified nucleoside with phosphorothioate linkage
  modified_base 3: mod_base = OTHER; note = 2'-O-methyl modified nucleoside
  modified_base 4: mod_base = OTHER; note = 2'-fluoro-modified nucleoside
  modified_base 5: mod_base = OTHER; note = 2'-O-methyl modified nucleoside
  modified_base 6: mod_base = OTHER; note = 2'-fluoro-modified nucleoside
  modified_base 7: mod_base = OTHER; note = 2'-O-methyl modified nucleoside
  modified_base 8: mod_base = OTHER; note = 2'-fluoro-modified nucleoside
  modified_base 9: mod_base = OTHER; note = 2'-O-methyl modified nucleoside
  modified_base 10: mod_base = OTHER; note = 2'-fluoro-modified nucleoside
  modified_base 11: mod_base = OTHER; note = 2'-O-methyl modified nucleoside
  modified_base 12: mod_base = OTHER; note = 2'-fluoro-modified nucleoside
  modified_base 13: mod_base = OTHER; note = 2'-O-methyl modified nucleoside
  modified_base 14: mod_base = OTHER; note = 2'-fluoro-modified nucleoside
  modified_base 15: mod_base = OTHER; note = 2'-O-methyl modified nucleoside
  modified_base 16: mod_base = OTHER; note = 2'-fluoro-modified nucleoside
  modified_base 17: mod_base = OTHER; note = 2'-O-methyl modified nucleoside
  modified_base 18: mod_base = OTHER; note = 2'-fluoro-modified nucleoside
  modified_base 19: mod_base = OTHER; note = 2'-O-methyl modified nucleoside with phosphorothioate linkage
  modified_base 20: mod_base = OTHER; note = 2'-O-methyl modified nucleoside with phosphorothioate linkage
  modified_base 21: mod_base = OTHER; note = 2'-O-methyl modified nucleoside
tttcgtctcagttgcagcttt

SEQ ID NO: 12739 - RNA, 21 nt, synthetic construct
  source 1..21: mol_type = other RNA
  modified_base 1: mod_base = OTHER; note = 2'-O-methyl modified nucleoside with phosphorothioate linkage
  modified_base 2: mod_base = OTHER; note = 2'-fluoro-modified nucleoside with phosphorothioate linkage
  modified_base 3: mod_base = OTHER; note = 2'-O-methyl modified nucleoside
  modified_base 4: mod_base = OTHER; note = 2'-fluoro-modified nucleoside
  modified_base 5: mod_base = OTHER; note = 2'-O-methyl modified nucleoside
  modified_base 6: mod_base = OTHER; note = 2'-fluoro-modified nucleoside
  modified_base 7: mod_base = OTHER; note = 2'-O-methyl modified nucleoside
  modified_base 8: mod_base = OTHER; note = 2'-fluoro-modified nucleoside
  modified_base 9: mod_base = OTHER; note = 2'-O-methyl modified nucleoside
  modified_base 10: mod_base = OTHER; note = 2'-fluoro-modified nucleoside
  modified_base 11: mod_base = OTHER; note = 2'-O-methyl modified nucleoside
  modified_base 12: mod_base = OTHER; note = 2'-fluoro-modified nucleoside
  modified_base 13: mod_base = OTHER; note = 2'-O-methyl modified nucleoside
  modified_base 14: mod_base = OTHER; note = 2'-fluoro-modified nucleoside
  modified_base 15: mod_base = OTHER; note = 2'-O-methyl modified nucleoside
  modified_base 16: mod_base = OTHER; note = 2'-fluoro-modified nucleoside
  modified_base 17: mod_base = OTHER; note = 2'-O-methyl modified nucleoside
  modified_base 18: mod_base = OTHER; note = 2'-fluoro-modified nucleoside
  modified_base 19: mod_base = OTHER; note = 2'-O-methyl modified nucleoside with phosphorothioate linkage
  modified_base 20: mod_base = OTHER; note = 2'-O-methyl modified nucleoside with phosphorothioate linkage
  modified_base 21: mod_base = OTHER; note = 2'-O-methyl modified nucleoside
tgatctatgaactggtagatt

SEQ ID NO: 12740 - RNA, 21 nt, synthetic construct
  source 1..21: mol_type = other RNA
  modified_base 1: mod_base = OTHER; note = 2'-O-methyl modified nucleoside with phosphorothioate linkage
  modified_base 2: mod_base = OTHER; note = 2'-fluoro-modified nucleoside with phosphorothioate linkage
  modified_base 3: mod_base = OTHER; note = 2'-O-methyl modified nucleoside
  modified_base 4: mod_base = OTHER; note = 2'-fluoro-modified nucleoside
  modified_base 5: mod_base = OTHER; note = 2'-O-methyl modified nucleoside
  modified_base 6: mod_base = OTHER; note = 2'-fluoro-modified nucleoside
  modified_base 7: mod_base = OTHER; note = 2'-O-methyl modified nucleoside
  modified_base 8: mod_base = OTHER; note = 2'-fluoro-modified nucleoside
  modified_base 9: mod_base = OTHER; note = 2'-O-methyl modified nucleoside
  modified_base 10: mod_base = OTHER; note = 2'-fluoro-modified nucleoside
  modified_base 11: mod_base = OTHER; note = 2'-O-methyl modified nucleoside
  modified_base 12: mod_base = OTHER; note = 2'-fluoro-modified nucleoside
  modified_base 13: mod_base = OTHER; note = 2'-O-methyl modified nucleoside
  modified_base 14: mod_base = OTHER; note = 2'-fluoro-modified nucleoside
  modified_base 15: mod_base = OTHER; note = 2'-O-methyl modified nucleoside
  modified_base 16: mod_base = OTHER; note = 2'-fluoro-modified nucleoside
  modified_base 17: mod_base = OTHER; note = 2'-O-methyl modified nucleoside
  modified_base 18: mod_base = OTHER; note = 2'-fluoro-modified nucleoside
  modified_base 19: mod_base = OTHER; note = 2'-O-methyl modified nucleoside with phosphorothioate linkage
  modified_base 20: mod_base = OTHER; note = 2'-O-methyl modified nucleoside with phosphorothioate linkage
  modified_base 21: mod_base = OTHER; note = 2'-O-methyl modified nucleoside
tggatctatgaactggtagtt

SEQ ID NO: 12741 - RNA, 21 nt, synthetic construct
  source 1..21: mol_type = other RNA
  modified_base 1: mod_base = OTHER; note = 2'-O-methyl modified nucleoside with phosphorothioate linkage
  modified_base 2: mod_base = OTHER; note = 2'-fluoro-modified nucleoside with phosphorothioate linkage
  modified_base 3: mod_base = OTHER; note = 2'-O-methyl modified nucleoside
  modified_base 4: mod_base = OTHER; note = 2'-fluoro-modified nucleoside
  modified_base 5: mod_base = OTHER; note = 2'-O-methyl modified nucleoside
  modified_base 6: mod_base = OTHER; note = 2'-fluoro-modified nucleoside
  modified_base 7: mod_base = OTHER; note = 2'-O-methyl modified nucleoside
  modified_base 8: mod_base = OTHER; note = 2'-fluoro-modified nucleoside
  modified_base 9: mod_base = OTHER; note = 2'-O-methyl modified nucleoside
  modified_base 10: mod_base = OTHER; note = 2'-fluoro-modified nucleoside
  modified_base 11: mod_base = OTHER; note = 2'-O-methyl modified nucleoside
  modified_base 12: mod_base = OTHER; note = 2'-fluoro-modified nucleoside
  modified_base 13: mod_base = OTHER; note = 2'-O-methyl modified nucleoside
  modified_base 14: mod_base = OTHER; note = 2'-fluoro-modified nucleoside
  modified_base 15: mod_base = OTHER; note = 2'-O-methyl modified nucleoside
  modified_base 16: mod_base = OTHER; note = 2'-fluoro-modified nucleoside
  modified_base 17: mod_base = OTHER; note = 2'-O-methyl modified nucleoside
  modified_base 18: mod_base = OTHER; note = 2'-fluoro-modified nucleoside
  modified_base 19: mod_base = OTHER; note = 2'-O-methyl modified nucleoside with phosphorothioate linkage
  modified_base 20: mod_base = OTHER; note = 2'-O-methyl modified nucleoside with phosphorothioate linkage
  modified_base 21: mod_base = OTHER; note = 2'-O-methyl modified nucleoside
tccaagcttatggatcaagtt

SEQ ID NO: 12742 - RNA, 21 nt, synthetic construct
  source 1..21: mol_type = other RNA
  modified_base 1: mod_base = OTHER; note = 2'-O-methyl modified nucleoside with phosphorothioate linkage
  modified_base 2: mod_base = OTHER; note = 2'-fluoro-modified nucleoside with phosphorothioate linkage
  modified_base 3: mod_base = OTHER; note = 2'-O-methyl modified nucleoside
  modified_base 4: mod_base = OTHER; note = 2'-fluoro-modified nucleoside
  modified_base 5: mod_base = OTHER; note = 2'-O-methyl modified nucleoside
  modified_base 6: mod_base = OTHER; note = 2'-fluoro-modified nucleoside
  modified_base 7: mod_base = OTHER; note = 2'-O-methyl modified nucleoside
  modified_base 8: mod_base = OTHER; note = 2'-fluoro-modified nucleoside
  modified_base 9: mod_base = OTHER; note = 2'-O-methyl modified nucleoside
  modified_base 10: mod_base = OTHER; note = 2'-fluoro-modified nucleoside
  modified_base 11: mod_base = OTHER; note = 2'-O-methyl modified nucleoside
  modified_base 12: mod_base = OTHER; note = 2'-fluoro-modified nucleoside
  modified_base 13: mod_base = OTHER; note = 2'-O-methyl modified nucleoside
  modified_base 14: mod_base = OTHER; note = 2'-fluoro-modified nucleoside
  modified_base 15: mod_base = OTHER; note = 2'-O-methyl modified nucleoside
  modified_base 16: mod_base = OTHER; note = 2'-fluoro-modified nucleoside
  modified_base 17: mod_base = OTHER; note = 2'-O-methyl modified nucleoside
  modified_base 18: mod_base = OTHER; note = 2'-fluoro-modified nucleoside
  modified_base 19: mod_base = OTHER; note = 2'-O-methyl modified nucleoside with phosphorothioate linkage
  modified_base 20: mod_base = OTHER; note = 2'-O-methyl modified nucleoside with phosphorothioate linkage
  modified_base 21: mod_base = OTHER; note = 2'-O-methyl modified nucleoside
ttagagaacatctttccgttt

SEQ ID NO: 12743 - RNA, 21 nt, synthetic construct
  source 1..21: mol_type = other RNA
  modified_base 1: mod_base = OTHER; note = 2'-O-methyl modified nucleoside with phosphorothioate linkage
  modified_base 2: mod_base = OTHER; note = 2'-fluoro-modified nucleoside with phosphorothioate linkage
  modified_base 3: mod_base = OTHER; note = 2'-O-methyl modified nucleoside
  modified_base 4: mod_base = OTHER; note = 2'-fluoro-modified nucleoside
  modified_base 5: mod_base = OTHER; note = 2'-O-methyl modified nucleoside
  modified_base 6: mod_base = OTHER; note = 2'-fluoro-modified nucleoside
  modified_base 7: mod_base = OTHER; note = 2'-O-methyl modified nucleoside
  modified_base 8: mod_base = OTHER; note = 2'-fluoro-modified nucleoside
  modified_base 9: mod_base = OTHER; note = 2'-O-methyl modified nucleoside
  modified_base 10: mod_base = OTHER; note = 2'-fluoro-modified nucleoside
  modified_base 11: mod_base = OTHER; note = 2'-O-methyl modified nucleoside
  modified_base 12: mod_base = OTHER; note = 2'-fluoro-modified nucleoside
  modified_base 13: mod_base = OTHER; note = 2'-O-methyl modified nucleoside
  modified_base 14: mod_base = OTHER; note = 2'-fluoro-modified nucleoside
  modified_base 15: mod_base = OTHER; note = 2'-O-methyl modified nucleoside
  modified_base 16: mod_base = OTHER; note = 2'-fluoro-modified nucleoside
  modified_base 17: mod_base = OTHER; note = 2'-O-methyl modified nucleoside
  modified_base 18: mod_base = OTHER; note = 2'-fluoro-modified nucleoside
  modified_base 19: mod_base = OTHER; note = 2'-O-methyl modified nucleoside with phosphorothioate linkage
  modified_base 20: mod_base = OTHER; note = 2'-O-methyl modified nucleoside with phosphorothioate linkage
  modified_base 21: mod_base = OTHER; note = 2'-O-methyl modified nucleoside
tcaactatatgcccatggatt

SEQ ID NO: 12744 - RNA, 21 nt, synthetic construct
  source 1..21: mol_type = other RNA
  modified_base 1: mod_base = OTHER; note = 2'-O-methyl modified nucleoside with phosphorothioate linkage
  modified_base 2: mod_base = OTHER; note = 2'-fluoro-modified nucleoside with phosphorothioate linkage
  modified_base 3: mod_base = OTHER; note = 2'-O-methyl modified nucleoside
  modified_base 4: mod_base = OTHER; note = 2'-fluoro-modified nucleoside
  modified_base 5: mod_base = OTHER; note = 2'-O-methyl modified nucleoside
  modified_base 6: mod_base = OTHER; note = 2'-fluoro-modified nucleoside
  modified_base 7: mod_base = OTHER; note = 2'-O-methyl modified nucleoside
  modified_base 8: mod_base = OTHER; note = 2'-fluoro-modified nucleoside
  modified_base 9: mod_base = OTHER; note = 2'-O-methyl modified nucleoside
  modified_base 10: mod_base = OTHER; note = 2'-fluoro-modified nucleoside
  modified_base 11: mod_base = OTHER; note = 2'-O-methyl modified nucleoside
  modified_base 12: mod_base = OTHER; note = 2'-fluoro-modified nucleoside
  modified_base 13: mod_base = OTHER; note = 2'-O-methyl modified nucleoside
  modified_base 14: mod_base = OTHER; note = 2'-fluoro-modified nucleoside
  modified_base 15: mod_base = OTHER; note = 2'-O-methyl modified nucleoside
  modified_base 16: mod_base = OTHER; note = 2'-fluoro-modified nucleoside
  modified_base 17: mod_base = OTHER; note = 2'-O-methyl modified nucleoside
  modified_base 18: mod_base = OTHER; note = 2'-fluoro-modified nucleoside
  modified_base 19: mod_base = OTHER; note = 2'-O-methyl modified nucleoside with phosphorothioate linkage
  modified_base 20: mod_base = OTHER; note = 2'-O-methyl modified nucleoside with phosphorothioate linkage
  modified_base 21: mod_base = OTHER; note = 2'-O-methyl modified nucleoside
tcgaagtaattcaactatatt

SEQ ID NO: 12745 - RNA, 21 nt, synthetic construct
  source 1..21: mol_type = other RNA
  modified_base 1: mod_base = OTHER; note = 2'-O-methyl modified nucleoside with phosphorothioate linkage
  modified_base 2: mod_base = OTHER; note = 2'-fluoro-modified nucleoside with phosphorothioate linkage
  modified_base 3: mod_base = OTHER; note = 2'-O-methyl modified nucleoside
  modified_base 4: mod_base = OTHER; note = 2'-fluoro-modified nucleoside
  modified_base 5: mod_base = OTHER; note = 2'-O-methyl modified nucleoside
  modified_base 6: mod_base = OTHER; note = 2'-fluoro-modified nucleoside
  modified_base 7: mod_base = OTHER; note = 2'-O-methyl modified nucleoside
  modified_base 8: mod_base = OTHER; note = 2'-fluoro-modified nucleoside
  modified_base 9: mod_base = OTHER; note = 2'-O-methyl modified nucleoside
  modified_base 10: mod_base = OTHER; note = 2'-fluoro-modified nucleoside
  modified_base 11: mod_base = OTHER; note = 2'-O-methyl modified nucleoside
  modified_base 12: mod_base = OTHER; note = 2'-fluoro-modified nucleoside
  modified_base 13: mod_base = OTHER; note = 2'-O-methyl modified nucleoside
  modified_base 14: mod_base = OTHER; note = 2'-fluoro-modified nucleoside
  modified_base 15: mod_base = OTHER; note = 2'-O-methyl modified nucleoside
  modified_base 16: mod_base = OTHER; note = 2'-fluoro-modified nucleoside
  modified_base 17: mod_base = OTHER; note = 2'-O-methyl modified nucleoside
  modified_base 18: mod_base = OTHER; note = 2'-fluoro-modified nucleoside
  modified_base 19: mod_base = OTHER; note = 2'-O-methyl modified nucleoside with phosphorothioate linkage
  modified_base 20: mod_base = OTHER; note = 2'-O-methyl modified nucleoside with phosphorothioate linkage
  modified_base 21: mod_base = OTHER; note = 2'-O-methyl modified nucleoside
ttcgaagtaattcaactattt

SEQ ID NO: 12746 - RNA, 21 nt, synthetic construct
  source 1..21: mol_type = other RNA
  modified_base 1: mod_base = OTHER; note = 2'-O-methyl modified nucleoside with phosphorothioate linkage
  modified_base 2: mod_base = OTHER; note = 2'-fluoro-modified nucleoside with phosphorothioate linkage
  modified_base 3: mod_base = OTHER; note = 2'-O-methyl modified nucleoside
  modified_base 4: mod_base = OTHER; note = 2'-fluoro-modified nucleoside
  modified_base 5: mod_base = OTHER; note = 2'-O-methyl modified nucleoside
  modified_base 6: mod_base = OTHER; note = 2'-fluoro-modified nucleoside
  modified_base 7: mod_base = OTHER; note = 2'-O-methyl modified nucleoside
  modified_base 8: mod_base = OTHER; note = 2'-fluoro-modified nucleoside
  modified_base 9: mod_base = OTHER; note = 2'-O-methyl modified nucleoside
  modified_base 10: mod_base = OTHER; note = 2'-fluoro-modified nucleoside
  modified_base 11: mod_base = OTHER; note = 2'-O-methyl modified nucleoside
  modified_base 12: mod_base = OTHER; note = 2'-fluoro-modified nucleoside
  modified_base 13: mod_base = OTHER; note = 2'-O-methyl modified nucleoside
  modified_base 14: mod_base = OTHER; note = 2'-fluoro-modified nucleoside
  modified_base 15: mod_base = OTHER; note = 2'-O-methyl modified nucleoside
  modified_base 16: mod_base = OTHER; note = 2'-fluoro-modified nucleoside
  modified_base 17: mod_base = OTHER; note = 2'-O-methyl modified nucleoside
  modified_base 18: mod_base = OTHER; note = 2'-fluoro-modified nucleoside
  modified_base 19: mod_base = OTHER; note = 2'-O-methyl modified nucleoside with phosphorothioate linkage
  modified_base 20: mod_base = OTHER; note = 2'-O-methyl modified nucleoside with phosphorothioate linkage
  modified_base 21: mod_base = OTHER; note = 2'-O-methyl modified nucleoside
ttgtcgaagtaattcaacttt

SEQ ID NO: 12747 - RNA, 21 nt, synthetic construct
  source 1..21: mol_type = other RNA
  modified_base 1: mod_base = OTHER; note = 2'-O-methyl modified nucleoside with phosphorothioate linkage
  modified_base 2: mod_base = OTHER; note = 2'-fluoro-modified nucleoside with phosphorothioate linkage
  modified_base 3: mod_base = OTHER; note = 2'-O-methyl modified nucleoside
  modified_base 4: mod_base = OTHER; note = 2'-fluoro-modified nucleoside
  modified_base 5: mod_base = OTHER; note = 2'-O-methyl modified nucleoside
  modified_base 6: mod_base = OTHER; note = 2'-fluoro-modified nucleoside
  modified_base 7: mod_base = OTHER; note = 2'-O-methyl modified nucleoside
  modified_base 8: mod_base = OTHER; note = 2'-fluoro-modified nucleoside
  modified_base 9: mod_base = OTHER; note = 2'-O-methyl modified nucleoside
  modified_base 10: mod_base = OTHER; note = 2'-fluoro-modified nucleoside
  modified_base 11: mod_base = OTHER; note = 2'-O-methyl modified nucleoside
  modified_base 12: mod_base = OTHER; note = 2'-fluoro-modified nucleoside
  modified_base 13: mod_base = OTHER; note = 2'-O-methyl modified nucleoside
  modified_base 14: mod_base = OTHER; note = 2'-fluoro-modified nucleoside
  modified_base 15: mod_base = OTHER; note = 2'-O-methyl modified nucleoside
  modified_base 16: mod_base = OTHER; note = 2'-fluoro-modified nucleoside
  modified_base 17: mod_base = OTHER; note = 2'-O-methyl modified nucleoside
  modified_base 18: mod_base = OTHER; note = 2'-fluoro-modified nucleoside
  modified_base 19: mod_base = OTHER; note = 2'-O-methyl modified nucleoside with phosphorothioate linkage
  modified_base 20: mod_base = OTHER; note = 2'-O-methyl modified nucleoside with phosphorothioate linkage
  modified_base 21: mod_base = OTHER; note = 2'-O-methyl modified nucleoside
tagaattgctgctgtcgaatt

SEQ ID NO: 12748 - RNA, 21 nt, synthetic construct
  source 1..21: mol_type = other RNA
  modified_base 1: mod_base = OTHER; note = 2'-O-methyl modified nucleoside with phosphorothioate linkage
  modified_base 2: mod_base = OTHER; note = 2'-fluoro-modified nucleoside with phosphorothioate linkage
  modified_base 3: mod_base = OTHER; note = 2'-O-methyl modified nucleoside
  modified_base 4: mod_base = OTHER; note = 2'-fluoro-modified nucleoside
  modified_base 5: mod_base = OTHER; note = 2'-O-methyl modified nucleoside
  modified_base 6: mod_base = OTHER; note = 2'-fluoro-modified nucleoside
  modified_base 7: mod_base = OTHER; note = 2'-O-methyl modified nucleoside
  modified_base 8: mod_base = OTHER; note = 2'-fluoro-modified nucleoside
  modified_base 9: mod_base = OTHER; note = 2'-O-methyl modified nucleoside
  modified_base 10: mod_base = OTHER; note = 2'-fluoro-modified nucleoside
  modified_base 11: mod_base = OTHER; note = 2'-O-methyl modified nucleoside
  modified_base 12: mod_base = OTHER; note = 2'-fluoro-modified nucleoside
  modified_base 13: mod_base = OTHER; note = 2'-O-methyl modified nucleoside
  modified_base 14: mod_base = OTHER; note = 2'-fluoro-modified nucleoside
  modified_base 15: mod_base = OTHER; note = 2'-O-methyl modified nucleoside
  modified_base 16: mod_base = OTHER; note = 2'-fluoro-modified nucleoside
  modified_base 17: mod_base = OTHER; note = 2'-O-methyl modified nucleoside
  modified_base 18: mod_base = OTHER; note = 2'-fluoro-modified nucleoside
  modified_base 19: mod_base = OTHER; note = 2'-O-methyl modified nucleoside with phosphorothioate linkage
  modified_base 20: mod_base = OTHER; note = 2'-O-methyl modified nucleoside with phosphorothioate linkage
  modified_base 21: mod_base = OTHER; note = 2'-O-methyl modified nucleoside
tagagtatctaccacaacttt

SEQ ID NO: 12749 - RNA, 21 nt, synthetic construct
  source 1..21: mol_type = other RNA
  modified_base 1: mod_base = OTHER; note = 2'-O-methyl modified nucleoside with phosphorothioate linkage
  modified_base 2: mod_base = OTHER; note = 2'-fluoro-modified nucleoside with phosphorothioate linkage
  modified_base 3: mod_base = OTHER; note = 2'-O-methyl modified nucleoside
  modified_base 4: mod_base = OTHER; note = 2'-fluoro-modified nucleoside
  modified_base 5: mod_base = OTHER; note = 2'-O-methyl modified nucleoside
  modified_base 6: mod_base = OTHER; note = 2'-fluoro-modified nucleoside
  modified_base 7: mod_base = OTHER; note = 2'-O-methyl modified nucleoside
  modified_base 8: mod_base = OTHER; note = 2'-fluoro-modified nucleoside
  modified_base 9: mod_base = OTHER; note = 2'-O-methyl modified nucleoside
  modified_base 10: mod_base = OTHER; note = 2'-fluoro-modified nucleoside
  modified_base 11: mod_base = OTHER; note = 2'-O-methyl modified nucleoside
  modified_base 12: mod_base = OTHER; note = 2'-fluoro-modified nucleoside
  modified_base 13: mod_base = OTHER; note = 2'-O-methyl modified nucleoside
  modified_base 14: mod_base = OTHER; note = 2'-fluoro-modified nucleoside
  modified_base 15: mod_base = OTHER; note = 2'-O-methyl modified nucleoside
  modified_base 16: mod_base = OTHER; note = 2'-fluoro-modified nucleoside
  modified_base 17: mod_base = OTHER; note = 2'-O-methyl modified nucleoside
  modified_base 18: mod_base = OTHER; note = 2'-fluoro-modified nucleoside
  modified_base 19: mod_base = OTHER; note = 2'-O-methyl modified nucleoside with phosphorothioate linkage
  modified_base 20: mod_base = OTHER; note = 2'-O-methyl modified nucleoside with phosphorothioate linkage
  modified_base 21: mod_base = OTHER; note = 2'-O-methyl modified nucleoside
tcgatcataggagattccatt

SEQ ID NO: 12750 - RNA, 21 nt, synthetic construct
  source 1..21: mol_type = other RNA
  modified_base 1: mod_base = OTHER; note = 2'-O-methyl modified nucleoside with phosphorothioate linkage
  modified_base 2: mod_base = OTHER; note = 2'-fluoro-modified nucleoside with phosphorothioate linkage
  modified_base 3: mod_base = OTHER; note = 2'-O-methyl modified nucleoside
  modified_base 4: mod_base = OTHER; note = 2'-fluoro-modified nucleoside
  modified_base 5: mod_base = OTHER; note = 2'-O-methyl modified nucleoside
  modified_base 6: mod_base = OTHER; note = 2'-fluoro-modified nucleoside
  modified_base 7: mod_base = OTHER; note = 2'-O-methyl modified nucleoside
  modified_base 8: mod_base = OTHER; note = 2'-fluoro-modified nucleoside
  modified_base 9: mod_base = OTHER; note = 2'-O-methyl modified nucleoside
  modified_base 10: mod_base = OTHER; note = 2'-fluoro-modified nucleoside
  modified_base 11: mod_base = OTHER; note = 2'-O-methyl modified nucleoside
  modified_base 12: mod_base = OTHER; note = 2'-fluoro-modified nucleoside
  modified_base 13: mod_base = OTHER; note = 2'-O-methyl modified nucleoside
  modified_base 14: mod_base = OTHER; note = 2'-fluoro-modified nucleoside
  modified_base 15: mod_base = OTHER; note = 2'-O-methyl modified nucleoside
  modified_base 16: mod_base = OTHER; note = 2'-fluoro-modified nucleoside
  modified_base 17: mod_base = OTHER; note = 2'-O-methyl modified nucleoside
  modified_base 18: mod_base = OTHER; note = 2'-fluoro-modified nucleoside
  modified_base 19: mod_base = OTHER; note = 2'-O-methyl modified nucleoside with phosphorothioate linkage
  modified_base 20: mod_base = OTHER; note = 2'-O-methyl modified nucleoside with phosphorothioate linkage
  modified_base 21: mod_base = OTHER; note = 2'-O-methyl modified nucleoside
tcattgtagtgaccttcgatt

SEQ ID NO: 12751 - RNA, 21 nt, synthetic construct
  source 1..21: mol_type = other RNA
  modified_base 1: mod_base = OTHER; note = 2'-O-methyl modified nucleoside with phosphorothioate linkage
  modified_base 2: mod_base = OTHER; note = 2'-fluoro-modified nucleoside with phosphorothioate linkage
  modified_base 3: mod_base = OTHER; note = 2'-O-methyl modified nucleoside
  modified_base 4: mod_base = OTHER; note = 2'-fluoro-modified nucleoside
  modified_base 5: mod_base = OTHER; note = 2'-O-methyl modified nucleoside
  modified_base 6: mod_base = OTHER; note = 2'-fluoro-modified nucleoside
  modified_base 7: mod_base = OTHER; note = 2'-O-methyl modified nucleoside
  modified_base 8: mod_base = OTHER; note = 2'-fluoro-modified nucleoside
  modified_base 9: mod_base = OTHER; note = 2'-O-methyl modified nucleoside
  modified_base 10: mod_base = OTHER; note = 2'-fluoro-modified nucleoside
  modified_base 11: mod_base = OTHER; note = 2'-O-methyl modified nucleoside
  modified_base 12: mod_base = OTHER; note = 2'-fluoro-modified nucleoside
  modified_base 13: mod_base = OTHER; note = 2'-O-methyl modified nucleoside
  modified_base 14: mod_base = OTHER; note = 2'-fluoro-modified nucleoside
  modified_base 15: mod_base = OTHER; note = 2'-O-methyl modified nucleoside
  modified_base 16: mod_base = OTHER; note = 2'-fluoro-modified nucleoside
  modified_base 17: mod_base = OTHER; note = 2'-O-methyl modified nucleoside
  modified_base 18: mod_base = OTHER; note = 2'-fluoro-modified nucleoside
  modified_base 19: mod_base = OTHER; note = 2'-O-methyl modified nucleoside with phosphorothioate linkage
  modified_base 20: mod_base = OTHER; note = 2'-O-methyl modified nucleoside with phosphorothioate linkage
  modified_base 21: mod_base = OTHER; note = 2'-O-methyl modified nucleoside
tcgtaacattctaataacatt

SEQ ID NO: 12752 - RNA, 21 nt, synthetic construct
  source 1..21: mol_type = other RNA
  modified_base 1: mod_base = OTHER; note = 2'-O-methyl modified nucleoside with phosphorothioate linkage
  modified_base 2: mod_base = OTHER; note = 2'-fluoro-modified nucleoside with phosphorothioate linkage
  modified_base 3: mod_base = OTHER; note = 2'-O-methyl modified nucleoside
  modified_base 4: mod_base = OTHER; note = 2'-fluoro-modified nucleoside
  modified_base 5: mod_base = OTHER; note = 2'-O-methyl modified nucleoside
  modified_base 6: mod_base = OTHER; note = 2'-fluoro-modified nucleoside
  modified_base 7: mod_base = OTHER; note = 2'-O-methyl modified nucleoside
  modified_base 8: mod_base = OTHER; note = 2'-fluoro-modified nucleoside
  modified_base 9: mod_base = OTHER; note = 2'-O-methyl modified nucleoside
  modified_base 10: mod_base = OTHER; note = 2'-fluoro-modified nucleoside
  modified_base 11: mod_base = OTHER; note = 2'-O-methyl modified nucleoside
  modified_base 12: mod_base = OTHER; note = 2'-fluoro-modified nucleoside
  modified_base 13: mod_base = OTHER; note = 2'-O-methyl modified nucleoside
  modified_base 14: mod_base = OTHER; note = 2'-fluoro-modified nucleoside
  modified_base 15: mod_base = OTHER; note = 2'-O-methyl modified nucleoside
  modified_base 16: mod_base = OTHER; note = 2'-fluoro-modified nucleoside
  modified_base 17: mod_base = OTHER; note = 2'-O-methyl modified nucleoside
  modified_base 18: mod_base = OTHER; note = 2'-fluoro-modified nucleoside
  modified_base 19: mod_base = OTHER; note = 2'-O-methyl modified nucleoside with phosphorothioate linkage
  modified_base 20: mod_base = OTHER; note = 2'-O-methyl modified nucleoside with phosphorothioate linkage
  modified_base 21: mod_base = OTHER; note = 2'-O-methyl modified nucleoside
tcggacacaaccatagttttt

SEQ ID NO: 12753 - RNA, 21 nt, synthetic construct
  source 1..21: mol_type = other RNA
  modified_base 1: mod_base = OTHER; note = 2'-O-methyl modified nucleoside with phosphorothioate linkage
  modified_base 2: mod_base = OTHER; note = 2'-fluoro-modified nucleoside with phosphorothioate linkage
  modified_base 3: mod_base = OTHER; note = 2'-O-methyl modified nucleoside
  modified_base 4: mod_base = OTHER; note = 2'-fluoro-modified nucleoside
  modified_base 5: mod_base = OTHER; note = 2'-O-methyl modified nucleoside
  modified_base 6: mod_base = OTHER; note = 2'-fluoro-modified nucleoside
  modified_base 7: mod_base = OTHER; note = 2'-O-methyl modified nucleoside
  modified_base 8: mod_base = OTHER; note = 2'-fluoro-modified nucleoside
  modified_base 9: mod_base = OTHER; note = 2'-O-methyl modified nucleoside
  modified_base 10: mod_base = OTHER; note = 2'-fluoro-modified nucleoside
  modified_base 11: mod_base = OTHER; note = 2'-O-methyl modified nucleoside
  modified_base 12: mod_base = OTHER; note = 2'-fluoro-modified nucleoside
  modified_base 13: mod_base = OTHER; note = 2'-O-methyl modified nucleoside
  modified_base 14: mod_base = OTHER; note = 2'-fluoro-modified nucleoside
  modified_base 15: mod_base = OTHER; note = 2'-O-methyl modified nucleoside
  modified_base 16: mod_base = OTHER; note = 2'-fluoro-modified nucleoside
  modified_base 17: mod_base = OTHER; note = 2'-O-methyl modified nucleoside
  modified_base 18: mod_base = OTHER; note = 2'-fluoro-modified nucleoside
  modified_base 19: mod_base = OTHER; note = 2'-O-methyl modified nucleoside with phosphorothioate linkage
  modified_base 20: mod_base = OTHER; note = 2'-O-methyl modified nucleoside with phosphorothioate linkage
  modified_base 21: mod_base = OTHER; note = 2'-O-methyl modified nucleoside
ttagctggtaacaacgctttt

SEQ ID NO: 12754 - RNA, 21 nt, synthetic construct
  source 1..21: mol_type = other RNA
  modified_base 1: mod_base = OTHER; note = 2'-O-methyl modified nucleoside with phosphorothioate linkage
  modified_base 2: mod_base = OTHER; note = 2'-fluoro-modified nucleoside with phosphorothioate linkage
  modified_base 3: mod_base = OTHER; note = 2'-O-methyl modified nucleoside
  modified_base 4: mod_base = OTHER; note = 2'-fluoro-modified nucleoside
  modified_base 5: mod_base = OTHER; note = 2'-O-methyl modified nucleoside
  modified_base 6: mod_base = OTHER; note = 2'-fluoro-modified nucleoside
  modified_base 7: mod_base = OTHER; note = 2'-O-methyl modified nucleoside
  modified_base 8: mod_base = OTHER; note = 2'-fluoro-modified nucleoside
  modified_base 9: mod_base = OTHER; note = 2'-O-methyl modified nucleoside
  modified_base 10: mod_base = OTHER; note = 2'-fluoro-modified nucleoside
  modified_base 11: mod_base = OTHER; note = 2'-O-methyl modified nucleoside
  modified_base 12: mod_base = OTHER; note = 2'-fluoro-modified nucleoside
  modified_base 13: mod_base = OTHER; note = 2'-O-methyl modified nucleoside
  modified_base 14: mod_base = OTHER; note = 2'-fluoro-modified nucleoside
  modified_base 15: mod_base = OTHER; note = 2'-O-methyl modified nucleoside
  modified_base 16: mod_base = OTHER; note = 2'-fluoro-modified nucleoside
  modified_base 17: mod_base = OTHER; note = 2'-O-methyl modified nucleoside
  modified_base 18: mod_base = OTHER; note = 2'-fluoro-modified nucleoside
  modified_base 19: mod_base = OTHER; note = 2'-O-methyl modified nucleoside with phosphorothioate linkage
  modified_base 20: mod_base = OTHER; note = 2'-O-methyl modified nucleoside with phosphorothioate linkage
  modified_base 21: mod_base = OTHER; note = 2'-O-methyl modified nucleoside
tacttgctagcagtgaatatt

SEQ ID NO: 12755 - RNA, 21 nt, synthetic construct
  source 1..21: mol_type = other RNA
  modified_base 1: mod_base = OTHER; note = 2'-O-methyl modified nucleoside with phosphorothioate linkage
  modified_base 2: mod_base = OTHER; note = 2'-fluoro-modified nucleoside with phosphorothioate linkage
  modified_base 3: mod_base = OTHER; note = 2'-O-methyl modified nucleoside
  modified_base 4: mod_base = OTHER; note = 2'-fluoro-modified nucleoside
  modified_base 5: mod_base = OTHER; note = 2'-O-methyl modified nucleoside
  modified_base 6: mod_base = OTHER; note = 2'-fluoro-modified nucleoside
  modified_base 7: mod_base = OTHER; note = 2'-O-methyl modified nucleoside
  modified_base 8: mod_base = OTHER; note = 2'-fluoro-modified nucleoside
  modified_base 9: mod_base = OTHER; note = 2'-O-methyl modified nucleoside
  modified_base 10: mod_base = OTHER; note = 2'-fluoro-modified nucleoside
  modified_base 11: mod_base = OTHER; note = 2'-O-methyl modified nucleoside
  modified_base 12: mod_base = OTHER; note = 2'-fluoro-modified nucleoside
  modified_base 13: mod_base = OTHER; note = 2'-O-methyl modified nucleoside
  modified_base 14: mod_base = OTHER; note = 2'-fluoro-modified nucleoside
  modified_base 15: mod_base = OTHER; note = 2'-O-methyl modified nucleoside
  modified_base 16: mod_base = OTHER; note = 2'-fluoro-modified nucleoside
  modified_base 17: mod_base = OTHER; note = 2'-O-methyl modified nucleoside
  modified_base 18: mod_base = OTHER; note = 2'-fluoro-modified nucleoside
  modified_base 19: mod_base = OTHER; note = 2'-O-methyl modified nucleoside with phosphorothioate linkage
  modified_base 20: mod_base = OTHER; note = 2'-O-methyl modified nucleoside with phosphorothioate linkage
  modified_base 21: mod_base = OTHER; note = 2'-O-methyl modified nucleoside
tgacttgctagcagtgaattt

SEQ ID NO: 12756 - RNA, 21 nt, synthetic construct
  source 1..21: mol_type = other RNA
  modified_base 1: mod_base = OTHER; note = 2'-O-methyl modified nucleoside with phosphorothioate linkage
  modified_base 2: mod_base = OTHER; note = 2'-fluoro-modified nucleoside with phosphorothioate linkage
  modified_base 3: mod_base = OTHER; note = 2'-O-methyl modified nucleoside
  modified_base 4: mod_base = OTHER; note = 2'-fluoro-modified nucleoside
  modified_base 5: mod_base = OTHER; note = 2'-O-methyl modified nucleoside
  modified_base 6: mod_base = OTHER; note = 2'-fluoro-modified nucleoside
  modified_base 7: mod_base = OTHER; note = 2'-O-methyl modified nucleoside
  modified_base 8: mod_base = OTHER; note = 2'-fluoro-modified nucleoside
  modified_base 9: mod_base = OTHER; note = 2'-O-methyl modified nucleoside
  modified_base 10: mod_base = OTHER; note = 2'-fluoro-modified nucleoside
  modified_base 11: mod_base = OTHER; note = 2'-O-methyl modified nucleoside
  modified_base 12: mod_base = OTHER; note = 2'-fluoro-modified nucleoside
  modified_base 13: mod_base = OTHER; note = 2'-O-methyl modified nucleoside
  modified_base 14: mod_base = OTHER; note = 2'-fluoro-modified nucleoside
  modified_base 15: mod_base = OTHER; note = 2'-O-methyl modified nucleoside
  modified_base 16: mod_base = OTHER; note = 2'-fluoro-modified nucleoside
  modified_base 17: mod_base = OTHER; note = 2'-O-methyl modified nucleoside
  modified_base 18: mod_base = OTHER; note = 2'-fluoro-modified nucleoside
  modified_base 19: mod_base = OTHER; note = 2'-O-methyl modified nucleoside with phosphorothioate linkage
  modified_base 20: mod_base = OTHER; note = 2'-O-methyl modified nucleoside with phosphorothioate linkage
  modified_base 21: mod_base = OTHER; note = 2'-O-methyl modified nucleoside
tcaatgtgtgtggacataatt

SEQ ID NO: 12757 - RNA, 21 nt, synthetic construct
  source 1..21: mol_type = other RNA
  modified_base 1: mod_base = OTHER; note = 2'-O-methyl modified nucleoside with phosphorothioate linkage
  modified_base 2: mod_base = OTHER; note = 2'-fluoro-modified nucleoside with phosphorothioate linkage
  modified_base 3: mod_base = OTHER; note = 2'-O-methyl modified nucleoside
  modified_base 4: mod_base = OTHER; note = 2'-fluoro-modified nucleoside
  modified_base 5: mod_base = OTHER; note = 2'-O-methyl modified nucleoside
  modified_base 6: mod_base = OTHER; note = 2'-fluoro-modified nucleoside
  modified_base 7: mod_base = OTHER; note = 2'-O-methyl modified nucleoside
  modified_base 8: mod_base = OTHER; note = 2'-fluoro-modified nucleoside
  modified_base 9: mod_base = OTHER; note = 2'-O-methyl modified nucleoside
  modified_base 10: mod_base = OTHER; note = 2'-fluoro-modified nucleoside
  modified_base 11: mod_base = OTHER; note = 2'-O-methyl modified nucleoside
  modified_base 12: mod_base = OTHER; note = 2'-fluoro-modified nucleoside
  modified_base 13: mod_base = OTHER; note = 2'-O-methyl modified nucleoside
  modified_base 14: mod_base = OTHER; note = 2'-fluoro-modified nucleoside
  modified_base 15: mod_base = OTHER; note = 2'-O-methyl modified nucleoside
  modified_base 16: mod_base = OTHER; note = 2'-fluoro-modified nucleoside
  modified_base 17: mod_base = OTHER; note = 2'-O-methyl modified nucleoside
  modified_base 18: mod_base = OTHER; note = 2'-fluoro-modified nucleoside
  modified_base 19: mod_base = OTHER; note = 2'-O-methyl modified nucleoside with phosphorothioate linkage
  modified_base 20: mod_base = OTHER; note = 2'-O-methyl modified nucleoside with phosphorothioate linkage
  modified_base 21: mod_base = OTHER; note = 2'-O-methyl modified nucleoside
tgcaacatttctttctgtttt

SEQ ID NO: 12758 - RNA, 21 nt, synthetic construct
  source 1..21: mol_type = other RNA
  modified_base 1: mod_base = OTHER; note = 2'-O-methyl modified nucleoside with phosphorothioate linkage
  modified_base 2: mod_base = OTHER; note = 2'-fluoro-modified nucleoside with phosphorothioate linkage
  modified_base 3: mod_base = OTHER; note = 2'-O-methyl modified nucleoside
  modified_base 4: mod_base = OTHER; note = 2'-fluoro-modified nucleoside
  modified_base 5: mod_base = OTHER; note = 2'-O-methyl modified nucleoside
  modified_base 6: mod_base = OTHER; note = 2'-fluoro-modified nucleoside
  modified_base 7: mod_base = OTHER; note = 2'-O-methyl modified nucleoside
  modified_base 8: mod_base = OTHER; note = 2'-fluoro-modified nucleoside
  modified_base 9: mod_base = OTHER; note = 2'-O-methyl modified nucleoside
  modified_base 10: mod_base = OTHER; note = 2'-fluoro-modified nucleoside
  modified_base 11: mod_base = OTHER; note = 2'-O-methyl modified nucleoside
  modified_base 12: mod_base = OTHER; note = 2'-fluoro-modified nucleoside
  modified_base 13: mod_base = OTHER; note = 2'-O-methyl modified nucleoside
  modified_base 14: mod_base = OTHER; note = 2'-fluoro-modified nucleoside
  modified_base 15: mod_base = OTHER; note = 2'-O-methyl modified nucleoside
  modified_base 16: mod_base = OTHER; note = 2'-fluoro-modified nucleoside
  modified_base 17: mod_base = OTHER; note = 2'-O-methyl modified nucleoside
  modified_base 18: mod_base = OTHER; note = 2'-fluoro-modified nucleoside
  modified_base 19: mod_base = OTHER; note = 2'-O-methyl modified nucleoside with phosphorothioate linkage
  modified_base 20: mod_base = OTHER; note = 2'-O-methyl modified nucleoside with phosphorothioate linkage
  modified_base 21: mod_base = OTHER; note = 2'-O-methyl modified nucleoside
tacaaaactcagaatatattt

SEQ ID NO: 12759 - RNA, 21 nt, synthetic construct
  source 1..21: mol_type = other RNA
  modified_base 1: mod_base = OTHER; note = 2'-O-methyl modified nucleoside with phosphorothioate linkage
  modified_base 2: mod_base = OTHER; note = 2'-O-methyl modified nucleoside with phosphorothioate linkage
  modified_base 3: mod_base = OTHER; note = 2'-O-methyl modified nucleoside
  modified_base 4: mod_base = OTHER; note = 2'-O-methyl modified nucleoside
  modified_base 5: mod_base = OTHER; note = 2'-O-methyl modified nucleoside
  modified_base 6: mod_base = OTHER; note = 2'-O-methyl modified nucleoside
  modified_base 7: mod_base = OTHER; note = 2'-fluoro-modified nucleoside
  modified_base 8: mod_base = OTHER; note = 2'-O-methyl modified nucleoside
  modified_base 9: mod_base = OTHER; note = 2'-fluoro-modified nucleoside
  modified_base 10: mod_base = OTHER; note = 2'-O-methyl modified nucleoside
  modified_base 11: mod_base = OTHER; note = 2'-fluoro-modified nucleoside
  modified_base 12: mod_base = OTHER; note = 2'-O-methyl modified nucleoside
  modified_base 13: mod_base = OTHER; note = 2'-O-methyl modified nucleoside
  modified_base 14: mod_base = OTHER; note = 2'-O-methyl modified nucleoside
  modified_base 15: mod_base = OTHER; note = 2'-O-methyl modified nucleoside
  modified_base 16: mod_base = OTHER; note = 2'-O-methyl modified nucleoside
  modified_base 17: mod_base = OTHER; note = 2'-O-methyl modified nucleoside
  modified_base 18: mod_base = OTHER; note = 2'-O-methyl modified nucleoside
  modified_base 19: mod_base = OTHER; note = 2'-O-methyl modified nucleoside with phosphorothioate linkage
  modified_base 20: mod_base = OTHER; note = 2'-O-methyl modified nucleoside with phosphorothioate linkage
  modified_base 21: mod_base = OTHER; note = 2'-O-methyl modified nucleoside
atcagaatacagtgttggatt

SEQ ID NO: 12760 - RNA, 21 nt, synthetic construct
  source 1..21: mol_type = other RNA
  modified_base 1: mod_base = OTHER; note = 2'-O-methyl modified nucleoside with phosphorothioate linkage
  modified_base 2: mod_base = OTHER; note = 2'-O-methyl modified nucleoside with phosphorothioate linkage
  modified_base 3: mod_base = OTHER; note = 2'-O-methyl modified nucleoside
  modified_base 4: mod_base = OTHER; note = 2'-O-methyl modified nucleoside
  modified_base 5: mod_base = OTHER; note = 2'-O-methyl modified nucleoside
  modified_base 6: mod_base = OTHER; note = 2'-fluoro-modified nucleoside
  modified_base 7: mod_base = OTHER; note = 2'-O-methyl modified nucleoside
  modified_base 8: mod_base = OTHER; note = 2'-O-methyl modified nucleoside
  modified_base 9: mod_base = OTHER; note = 2'-fluoro-modified nucleoside
  modified_base 10: mod_base = OTHER; note = 2'-O-methyl modified nucleoside
  modified_base 11: mod_base = OTHER; note = 2'-fluoro-modified nucleoside
  modified_base 12: mod_base = OTHER; note = 2'-O-methyl modified nucleoside
  modified_base 13: mod_base = OTHER; note = 2'-O-methyl modified nucleoside
  modified_base 14: mod_base = OTHER; note = 2'-O-methyl modified nucleoside
  modified_base 15: mod_base = OTHER; note = 2'-O-methyl modified nucleoside
  modified_base 16: mod_base = OTHER; note = 2'-O-methyl modified nucleoside
  modified_base 17: mod_base = OTHER; note = 2'-O-methyl modified nucleoside
  modified_base 18: mod_base = OTHER; note = 2'-O-methyl modified nucleoside
  modified_base 19: mod_base = OTHER; note = 2'-O-methyl modified nucleoside with phosphorothioate linkage
  modified_base 20: mod_base = OTHER; note = 2'-O-methyl modified nucleoside with phosphorothioate linkage
  modified_base 21: mod_base = OTHER; note = 2'-O-methyl modified nucleoside
atcagaatacagtgttggatt

SEQ ID NO: 12761 - RNA, 21 nt, synthetic construct
  source 1..21: mol_type = other RNA
  modified_base 1: mod_base = OTHER; note = 2'-O-methyl modified nucleoside with phosphorothioate linkage
  modified_base 2: mod_base = OTHER; note = 2'-O-methyl modified nucleoside with phosphorothioate linkage
  modified_base 3: mod_base = OTHER; note = 2'-O-methyl modified nucleoside
  modified_base 4: mod_base = OTHER; note = 2'-O-methyl modified nucleoside
  modified_base 5: mod_base = OTHER; note = 2'-O-methyl modified nucleoside
  modified_base 6: mod_base = OTHER; note = 2'-fluoro-modified nucleoside
  modified_base 7: mod_base = OTHER; note = 2'-fluoro-modified nucleoside
  modified_base 8: mod_base = OTHER; note = 2'-O-methyl modified nucleoside
  modified_base 9: mod_base = OTHER; note = 2'-fluoro-modified nucleoside
  modified_base 10: mod_base = OTHER; note = 2'-O-methyl modified nucleoside
  modified_base 11: mod_base = OTHER; note = 2'-O-methyl modified nucleoside
  modified_base 12: mod_base = OTHER; note = 2'-O-methyl modified nucleoside
  modified_base 13: mod_base = OTHER; note = 2'-O-methyl modified nucleoside
  modified_base 14: mod_base = OTHER; note = 2'-O-methyl modified nucleoside
  modified_base 15: mod_base = OTHER; note = 2'-O-methyl modified nucleoside
  modified_base 16: mod_base = OTHER; note = 2'-O-methyl modified nucleoside
  modified_base 17: mod_base = OTHER; note = 2'-O-methyl modified nucleoside
  modified_base 18: mod_base = OTHER; note = 2'-O-methyl modified nucleoside
  modified_base 19: mod_base = OTHER; note = 2'-O-methyl modified nucleoside with phosphorothioate linkage
  modified_base 20: mod_base = OTHER; note = 2'-O-methyl modified nucleoside with phosphorothioate linkage
  modified_base 21: mod_base = OTHER; note = 2'-O-methyl modified nucleoside
atcagaatacagtgttggatt

SEQ ID NO: 12762 - RNA, 21 nt, synthetic construct
  source 1..21: mol_type = other RNA
  modified_base 1: mod_base = OTHER; note = 2'-O-methyl modified nucleoside with phosphorothioate linkage
  modified_base 2: mod_base = OTHER; note = 2'-O-methyl modified nucleoside with phosphorothioate linkage
  modified_base 3: mod_base = OTHER; note = 2'-O-methyl modified nucleoside
  modified_base 4: mod_base = OTHER; note = 2'-O-methyl modified nucleoside
  modified_base 5: mod_base = OTHER; note = 2'-O-methyl modified nucleoside
  modified_base 6: mod_base = OTHER; note = 2'-fluoro-modified nucleoside
  modified_base 7: mod_base = OTHER; note = 2'-fluoro-modified nucleoside
  modified_base 8: mod_base = OTHER; note = 2'-O-methyl modified nucleoside
  modified_base 9: mod_base = OTHER; note = 2'-fluoro-modified nucleoside
  modified_base 10: mod_base = OTHER; note = 2'-O-methyl modified nucleoside
  modified_base 11: mod_base = OTHER; note = 2'-fluoro-modified nucleoside
  modified_base 12: mod_base = OTHER; note = 2'-O-methyl modified nucleoside
  modified_base 13: mod_base = OTHER; note = 2'-O-methyl modified nucleoside
  modified_base 14: mod_base = OTHER; note = 2'-O-methyl modified nucleoside
  modified_base 15: mod_base = OTHER; note = 2'-O-methyl modified nucleoside
  modified_base 16: mod_base = OTHER; note = 2'-O-methyl modified nucleoside
  modified_base 17: mod_base = OTHER; note = 2'-O-methyl modified nucleoside
  modified_base 18: mod_base = OTHER; note = 2'-O-methyl modified nucleoside
  modified_base 19: mod_base = OTHER; note = 2'-O-methyl modified nucleoside with phosphorothioate linkage
  modified_base 20: mod_base = OTHER; note = 2'-O-methyl modified nucleoside with phosphorothioate linkage
  modified_base 21: mod_base = OTHER; note = 2'-O-methyl modified nucleoside
atcagaatacagtgttggatt

SEQ ID NO: 12763 - RNA, 21 nt, synthetic construct
  source 1..21: mol_type = other RNA
  modified_base 1: mod_base = OTHER; note = 2'-O-methyl modified nucleoside with phosphorothioate linkage
  modified_base 2: mod_base = OTHER; note = 2'-O-methyl modified nucleoside with phosphorothioate linkage
  modified_base 3: mod_base = OTHER; note = 2'-O-methyl modified nucleoside
  modified_base 4: mod_base = OTHER; note = 2'-O-methyl modified nucleoside
  modified_base 5: mod_base = OTHER; note = 2'-fluoro-modified nucleoside
  modified_base 6: mod_base = OTHER; note = 2'-O-methyl modified nucleoside
  modified_base 7: mod_base = OTHER; note = 2'-O-methyl modified nucleoside
  modified_base 8: mod_base = OTHER; note = 2'-O-methyl modified nucleoside
  modified_base 9: mod_base = OTHER; note = 2'-fluoro-modified nucleoside
  modified_base 10: mod_base = OTHER; note = 2'-O-methyl modified nucleoside
  modified_base 11: mod_base = OTHER; note = 2'-fluoro-modified nucleoside
  modified_base 12: mod_base = OTHER; note = 2'-O-methyl modified nucleoside
  modified_base 13: mod_base = OTHER; note = 2'-O-methyl modified nucleoside
  modified_base 14: mod_base = OTHER; note = 2'-O-methyl modified nucleoside
  modified_base 15: mod_base = OTHER; note = 2'-O-methyl modified nucleoside
  modified_base 16: mod_base = OTHER; note = 2'-O-methyl modified nucleoside
  modified_base 17: mod_base = OTHER; note = 2'-O-methyl modified nucleoside
  modified_base 18: mod_base = OTHER; note = 2'-O-methyl modified nucleoside
  modified_base 19: mod_base = OTHER; note = 2'-O-methyl modified nucleoside with phosphorothioate linkage
  modified_base 20: mod_base = OTHER; note = 2'-O-methyl modified nucleoside with phosphorothioate linkage
  modified_base 21: mod_base = OTHER; note = 2'-O-methyl modified nucleoside
atcagaatacagtgttggatt

SEQ ID NO: 12764 - RNA, 21 nt, synthetic construct
  source 1..21: mol_type = other RNA
  modified_base 1: mod_base = OTHER; note = 2'-O-methyl modified nucleoside with phosphorothioate linkage
  modified_base 2: mod_base = OTHER; note = 2'-O-methyl modified nucleoside with phosphorothioate linkage
  modified_base 3: mod_base = OTHER; note = 2'-O-methyl modified nucleoside
  modified_base 4: mod_base = OTHER; note = 2'-O-methyl modified nucleoside
  modified_base 5: mod_base = OTHER; note = 2'-fluoro-modified nucleoside
  modified_base 6: mod_base = OTHER; note = 2'-O-methyl modified nucleoside
  modified_base 7: mod_base = OTHER; note = 2'-fluoro-modified nucleoside
  modified_base 8: mod_base = OTHER; note = 2'-O-methyl modified nucleoside
  modified_base 9: mod_base = OTHER; note = 2'-fluoro-modified nucleoside
  modified_base 10: mod_base = OTHER; note = 2'-O-methyl modified nucleoside
  modified_base 11: mod_base = OTHER; note = 2'-O-methyl modified nucleoside
  modified_base 12: mod_base = OTHER; note = 2'-O-methyl modified nucleoside
  modified_base 13: mod_base = OTHER; note = 2'-O-methyl modified nucleoside
  modified_base 14: mod_base = OTHER; note = 2'-O-methyl modified nucleoside
  modified_base 15: mod_base = OTHER; note = 2'-O-methyl modified nucleoside
  modified_base 16: mod_base = OTHER; note = 2'-O-methyl modified nucleoside
  modified_base 17: mod_base = OTHER; note = 2'-O-methyl modified nucleoside
  modified_base 18: mod_base = OTHER; note = 2'-O-methyl modified nucleoside
  modified_base 19: mod_base = OTHER; note = 2'-O-methyl modified nucleoside with phosphorothioate linkage
  modified_base 20: mod_base = OTHER; note = 2'-O-methyl modified nucleoside with phosphorothioate linkage
  modified_base 21: mod_base = OTHER; note = 2'-O-methyl modified nucleoside
atcagaatacagtgttggatt

SEQ ID NO: 12765 - RNA, 21 nt, synthetic construct
  source 1..21: mol_type = other RNA
  modified_base 1: mod_base = OTHER; note = 2'-O-methyl modified nucleoside with phosphorothioate linkage
  modified_base 2: mod_base = OTHER; note = 2'-O-methyl modified nucleoside with phosphorothioate linkage
  modified_base 3: mod_base = OTHER; note = 2'-O-methyl modified nucleoside
  modified_base 4: mod_base = OTHER; note = 2'-O-methyl modified nucleoside
  modified_base 5: mod_base = OTHER; note = 2'-fluoro-modified nucleoside
  modified_base 6: mod_base = OTHER; note = 2'-O-methyl modified nucleoside
  modified_base 7: mod_base = OTHER; note = 2'-fluoro-modified nucleoside
  modified_base 8: mod_base = OTHER; note = 2'-O-methyl modified nucleoside
  modified_base 9: mod_base = OTHER; note = 2'-fluoro-modified nucleoside
  modified_base 10: mod_base = OTHER; note = 2'-O-methyl modified nucleoside
  modified_base 11: mod_base = OTHER; note = 2'-fluoro-modified nucleoside
  modified_base 12: mod_base = OTHER; note = 2'-O-methyl modified nucleoside
  modified_base 13: mod_base = OTHER; note = 2'-O-methyl modified nucleoside
  modified_base 14: mod_base = OTHER; note = 2'-O-methyl modified nucleoside
  modified_base 15: mod_base = OTHER; note = 2'-O-methyl modified nucleoside
  modified_base 16: mod_base = OTHER; note = 2'-O-methyl modified nucleoside
  modified_base 17: mod_base = OTHER; note = 2'-O-methyl modified nucleoside
  modified_base 18: mod_base = OTHER; note = 2'-O-methyl modified nucleoside
  modified_base 19: mod_base = OTHER; note = 2'-O-methyl modified nucleoside with phosphorothioate linkage
  modified_base 20: mod_base = OTHER; note = 2'-O-methyl modified nucleoside with phosphorothioate linkage
  modified_base 21: mod_base = OTHER; note = 2'-O-methyl modified nucleoside
atcagaatacagtgttggatt

SEQ ID NO: 12766 - RNA, 21 nt, synthetic construct
  source 1..21: mol_type = other RNA
  modified_base 1: mod_base = OTHER; note = 2'-O-methyl modified nucleoside with phosphorothioate linkage
  modified_base 2: mod_base = OTHER; note = 2'-O-methyl modified nucleoside with phosphorothioate linkage
  modified_base 3: mod_base = OTHER; note = 2'-O-methyl modified nucleoside
  modified_base 4: mod_base = OTHER; note = 2'-O-methyl modified nucleoside
  modified_base 5: mod_base = OTHER; note = 2'-fluoro-modified nucleoside
  modified_base 6: mod_base = OTHER; note = 2'-fluoro-modified nucleoside
  modified_base 7: mod_base = OTHER; note = 2'-O-methyl modified nucleoside
  modified_base 8: mod_base = OTHER; note = 2'-O-methyl modified nucleoside
  modified_base 9: mod_base = OTHER; note = 2'-fluoro-modified nucleoside
  modified_base 10: mod_base = OTHER; note = 2'-O-methyl modified nucleoside
  modified_base 11: mod_base = OTHER; note = 2'-O-methyl modified nucleoside
  modified_base 12: mod_base = OTHER; note = 2'-O-methyl modified nucleoside
  modified_base 13: mod_base = OTHER; note = 2'-O-methyl modified nucleoside
  modified_base 14: mod_base = OTHER; note = 2'-O-methyl modified nucleoside
  modified_base 15: mod_base = OTHER; note = 2'-O-methyl modified nucleoside
  modified_base 16: mod_base = OTHER; note = 2'-O-methyl modified nucleoside
  modified_base 17: mod_base = OTHER; note = 2'-O-methyl modified nucleoside
  modified_base 18: mod_base = OTHER; note = 2'-O-methyl modified nucleoside
  modified_base 19: mod_base = OTHER; note = 2'-O-methyl modified nucleoside with phosphorothioate linkage
  modified_base 20: mod_base = OTHER; note = 2'-O-methyl modified nucleoside with phosphorothioate linkage
  modified_base 21: mod_base = OTHER; note = 2'-O-methyl modified nucleoside
atcagaatacagtgttggatt

SEQ ID NO: 12767 - RNA, 21 nt, synthetic construct
  source 1..21: mol_type = other RNA
  modified_base 1: mod_base = OTHER; note = 2'-O-methyl modified nucleoside with phosphorothioate linkage
  modified_base 2: mod_base = OTHER; note = 2'-O-methyl modified nucleoside with phosphorothioate linkage
  modified_base 3: mod_base = OTHER; note = 2'-O-methyl modified nucleoside
  modified_base 4: mod_base = OTHER; note = 2'-O-methyl modified nucleoside
  modified_base 5: mod_base = OTHER; note = 2'-O-methyl modified nucleoside
  modified_base 6: mod_base = OTHER; note = 2'-O-methyl modified nucleoside
  modified_base 7: mod_base = OTHER; note = 2'-O-methyl modified nucleoside
  modified_base 8: mod_base = OTHER; note = 2'-O-methyl modified nucleoside
  modified_base 9: mod_base = OTHER; note = 2'-fluoro-modified nucleoside
  modified_base 10: mod_base = OTHER; note = 2'-fluoro-modified nucleoside
  modified_base 11: mod_base = OTHER; note = 2'-O-methyl modified nucleoside
  modified_base 12: mod_base = OTHER; note = 2'-O-methyl modified nucleoside
  modified_base 13: mod_base = OTHER; note = 2'-O-methyl modified nucleoside
  modified_base 14: mod_base = OTHER; note = 2'-O-methyl modified nucleoside
  modified_base 15: mod_base = OTHER; note = 2'-O-methyl modified nucleoside
  modified_base 16: mod_base = OTHER; note = 2'-O-methyl modified nucleoside
  modified_base 17: mod_base = OTHER; note = 2'-O-methyl modified nucleoside
  modified_base 18: mod_base = OTHER; note = 2'-O-methyl modified nucleoside
  modified_base 19: mod_base = OTHER; note = 2'-O-methyl modified nucleoside with phosphorothioate linkage
  modified_base 20: mod_base = OTHER; note = 2'-O-methyl modified nucleoside with phosphorothioate linkage
  modified_base 21: mod_base = OTHER; note = 2'-O-methyl modified nucleoside
ctttgggtttgcggaatgatt

SEQ ID NO: 12768 - RNA, 21 nt, synthetic construct
  source 1..21: mol_type = other RNA
  modified_base 1: mod_base = OTHER; note = 2'-O-methyl modified nucleoside with phosphorothioate linkage
  modified_base 2: mod_base = OTHER; note = 2'-O-methyl modified nucleoside with phosphorothioate linkage
  modified_base 3: mod_base = OTHER; note = 2'-O-methyl modified nucleoside
  modified_base 4: mod_base = OTHER; note = 2'-O-methyl modified nucleoside
  modified_base 5: mod_base = OTHER; note = 2'-O-methyl modified nucleoside
  modified_base 6: mod_base = OTHER; note = 2'-O-methyl modified nucleoside
  modified_base 7: mod_base = OTHER; note = 2'-O-methyl modified nucleoside
  modified_base 8: mod_base = OTHER; note = 2'-fluoro-modified nucleoside
  modified_base 9: mod_base = OTHER; note = 2'-fluoro-modified nucleoside
  modified_base 10: mod_base = OTHER; note = 2'-O-methyl modified nucleoside
  modified_base 11: mod_base = OTHER; note = 2'-O-methyl modified nucleoside
  modified_base 12: mod_base = OTHER; note = 2'-O-methyl modified nucleoside
  modified_base 13: mod_base = OTHER; note = 2'-O-methyl modified nucleoside
  modified_base 14: mod_base = OTHER; note = 2'-O-methyl modified nucleoside
  modified_base 15: mod_base = OTHER; note = 2'-O-methyl modified nucleoside
  modified_base 16: mod_base = OTHER; note = 2'-O-methyl modified nucleoside
  modified_base 17: mod_base = OTHER; note = 2'-O-methyl modified nucleoside
  modified_base 18: mod_base = OTHER; note = 2'-O-methyl modified nucleoside
  modified_base 19: mod_base = OTHER; note = 2'-O-methyl modified nucleoside with phosphorothioate linkage
  modified_base 20: mod_base = OTHER; note = 2'-O-methyl modified nucleoside with phosphorothioate linkage
  modified_base 21: mod_base = OTHER; note = 2'-O-methyl modified nucleoside
ctttgggtttgcggaatgatt

SEQ ID NO: 12769 - RNA, 21 nt, synthetic construct
  source 1..21: mol_type = other RNA
  modified_base 1: mod_base = OTHER; note = 2'-O-methyl modified nucleoside with phosphorothioate linkage
  modified_base 2: mod_base = OTHER; note = 2'-O-methyl modified nucleoside with phosphorothioate linkage
  modified_base 3: mod_base = OTHER; note = 2'-O-methyl modified nucleoside
  modified_base 4: mod_base = OTHER; note = 2'-O-methyl modified nucleoside
  modified_base 5: mod_base = OTHER; note = 2'-O-methyl modified nucleoside
  modified_base 6: mod_base = OTHER; note = 2'-O-methyl modified nucleoside
  modified_base 7: mod_base = OTHER; note = 2'-fluoro-modified nucleoside
  modified_base 8: mod_base = OTHER; note = 2'-O-methyl modified nucleoside
  modified_base 9: mod_base = OTHER; note = 2'-fluoro-modified nucleoside
  modified_base 10: mod_base = OTHER; note = 2'-O-methyl modified nucleoside
  modified_base 11: mod_base = OTHER; note = 2'-fluoro-modified nucleoside
  modified_base 12: mod_base = OTHER; note = 2'-O-methyl modified nucleoside
  modified_base 13: mod_base = OTHER; note = 2'-O-methyl modified nucleoside
  modified_base 14: mod_base = OTHER; note = 2'-O-methyl modified nucleoside
  modified_base 15: mod_base = OTHER; note = 2'-O-methyl modified nucleoside
  modified_base 16: mod_base = OTHER; note = 2'-O-methyl modified nucleoside
  modified_base 17: mod_base = OTHER; note = 2'-O-methyl modified nucleoside
  modified_base 18: mod_base = OTHER; note = 2'-O-methyl modified nucleoside
  modified_base 19: mod_base = OTHER; note = 2'-O-methyl modified nucleoside with phosphorothioate linkage
  modified_base 20: mod_base = OTHER; note = 2'-O-methyl modified nucleoside with phosphorothioate linkage
  modified_base 21: mod_base = OTHER; note = 2'-O-methyl modified nucleoside
ataagggcatgtttgccaatt

SEQ ID NO: 12770 - RNA, 21 nt, synthetic construct
  source 1..21: mol_type = other RNA
  modified_base 1: mod_base = OTHER; note = 2'-O-methyl modified nucleoside with phosphorothioate linkage
  modified_base 2: mod_base = OTHER; note = 2'-O-methyl modified nucleoside with phosphorothioate linkage
  modified_base 3: mod_base = OTHER; note = 2'-O-methyl modified nucleoside
  modified_base 4: mod_base = OTHER; note = 2'-O-methyl modified nucleoside
  modified_base 5: mod_base = OTHER; note = 2'-O-methyl modified nucleoside
  modified_base 6: mod_base = OTHER; note = 2'-fluoro-modified nucleoside
  modified_base 7: mod_base = OTHER; note = 2'-O-methyl modified nucleoside
  modified_base 8: mod_base = OTHER; note = 2'-O-methyl modified nucleoside
  modified_base 9: mod_base = OTHER; note = 2'-fluoro-modified nucleoside
  modified_base 10: mod_base = OTHER; note = 2'-O-methyl modified nucleoside
  modified_base 11: mod_base = OTHER; note = 2'-fluoro-modified nucleoside
  modified_base 12: mod_base = OTHER; note = 2'-O-methyl modified nucleoside
  modified_base 13: mod_base = OTHER; note = 2'-O-methyl modified nucleoside
  modified_base 14: mod_base = OTHER; note = 2'-O-methyl modified nucleoside
  modified_base 15: mod_base = OTHER; note = 2'-O-methyl modified nucleoside
  modified_base 16: mod_base = OTHER; note = 2'-O-methyl modified nucleoside
  modified_base 17: mod_base = OTHER; note = 2'-O-methyl modified nucleoside
  modified_base 18: mod_base = OTHER; note = 2'-O-methyl modified nucleoside
  modified_base 19: mod_base = OTHER; note = 2'-O-methyl modified nucleoside with phosphorothioate linkage
  modified_base 20: mod_base = OTHER; note = 2'-O-methyl modified nucleoside with phosphorothioate linkage
  modified_base 21: mod_base = OTHER; note = 2'-O-methyl modified nucleoside
ataagggcatgtttgccaatt

SEQ ID NO: 12771 - RNA, 21 nt, synthetic construct
  source 1..21: mol_type = other RNA
  modified_base 1: mod_base = OTHER; note = 2'-O-methyl modified nucleoside with phosphorothioate linkage
  modified_base 2: mod_base = OTHER; note = 2'-O-methyl modified nucleoside with phosphorothioate linkage
  modified_base 3: mod_base = OTHER; note = 2'-O-methyl modified nucleoside
  modified_base 4: mod_base = OTHER; note = 2'-O-methyl modified nucleoside
  modified_base 5: mod_base = OTHER; note = 2'-O-methyl modified nucleoside
  modified_base 6: mod_base = OTHER; note = 2'-fluoro-modified nucleoside
  modified_base 7: mod_base = OTHER; note = 2'-fluoro-modified nucleoside
  modified_base 8: mod_base = OTHER; note = 2'-O-methyl modified nucleoside
  modified_base 9: mod_base = OTHER; note = 2'-fluoro-modified nucleoside
  modified_base 10: mod_base = OTHER; note = 2'-O-methyl modified nucleoside
  modified_base 11: mod_base = OTHER; note = 2'-O-methyl modified nucleoside
  modified_base 12: mod_base = OTHER; note = 2'-O-methyl modified nucleoside
  modified_base 13: mod_base = OTHER; note = 2'-O-methyl modified nucleoside
  modified_base 14: mod_base = OTHER; note = 2'-O-methyl modified nucleoside
  modified_base 15: mod_base = OTHER; note = 2'-O-methyl modified nucleoside
  modified_base 16: mod_base = OTHER; note = 2'-O-methyl modified nucleoside
  modified_base 17: mod_base = OTHER; note = 2'-O-methyl modified nucleoside
  modified_base 18: mod_base = OTHER; note = 2'-O-methyl modified nucleoside
  modified_base 19: mod_base = OTHER; note = 2'-O-methyl modified nucleoside with phosphorothioate linkage
  modified_base 20: mod_base = OTHER; note = 2'-O-methyl modified nucleoside with phosphorothioate linkage
  modified_base 21: mod_base = OTHER; note = 2'-O-methyl modified nucleoside
ataagggcatgtttgccaatt

SEQ ID NO: 12772 - RNA, 21 nt, synthetic construct
  source 1..21: mol_type = other RNA
  modified_base 1: mod_base = OTHER; note = 2'-O-methyl modified nucleoside with phosphorothioate linkage
  modified_base 2: mod_base = OTHER; note = 2'-O-methyl modified nucleoside with phosphorothioate linkage
  modified_base 3: mod_base = OTHER; note = 2'-O-methyl modified nucleoside
  modified_base 4: mod_base = OTHER; note = 2'-O-methyl modified nucleoside
  modified_base 5: mod_base = OTHER; note = 2'-O-methyl modified nucleoside
  modified_base 6: mod_base = OTHER; note = 2'-fluoro-modified nucleoside
  modified_base 7: mod_base = OTHER; note = 2'-fluoro-modified nucleoside
  modified_base 8: mod_base = OTHER; note = 2'-O-methyl modified nucleoside
  modified_base 9: mod_base = OTHER; note = 2'-fluoro-modified nucleoside
  modified_base 10: mod_base = OTHER; note = 2'-O-methyl modified nucleoside
  modified_base 11: mod_base = OTHER; note = 2'-fluoro-modified nucleoside
  modified_base 12: mod_base = OTHER; note = 2'-O-methyl modified nucleoside
  modified_base 13: mod_base = OTHER; note = 2'-O-methyl modified nucleoside
  modified_base 14: mod_base = OTHER; note = 2'-O-methyl modified nucleoside
  modified_base 15: mod_base = OTHER; note = 2'-O-methyl modified nucleoside
  modified_base 16: mod_base = OTHER; note = 2'-O-methyl modified nucleoside
  modified_base 17: mod_base = OTHER; note = 2'-O-methyl modified nucleoside
  modified_base 18: mod_base = OTHER; note = 2'-O-methyl modified nucleoside
  modified_base 19: mod_base = OTHER; note = 2'-O-methyl modified nucleoside with phosphorothioate linkage
  modified_base 20: mod_base = OTHER; note = 2'-O-methyl modified nucleoside with phosphorothioate linkage
  modified_base 21: mod_base = OTHER; note = 2'-O-methyl modified nucleoside
ataagggcatgtttgccaatt

SEQ ID NO: 12773 - RNA, 21 nt, synthetic construct
  source 1..21: mol_type = other RNA
  modified_base 1: mod_base = OTHER; note = 2'-O-methyl modified nucleoside with phosphorothioate linkage
  modified_base 2: mod_base = OTHER; note = 2'-O-methyl modified nucleoside with phosphorothioate linkage
  modified_base 3: mod_base = OTHER; note = 2'-O-methyl modified nucleoside
  modified_base 4: mod_base = OTHER; note = 2'-O-methyl modified nucleoside
  modified_base 5: mod_base = OTHER; note = 2'-fluoro-modified nucleoside
  modified_base 6: mod_base = OTHER; note = 2'-O-methyl modified nucleoside
  modified_base 7: mod_base = OTHER; note = 2'-O-methyl modified nucleoside
  modified_base 8: mod_base = OTHER; note = 2'-O-methyl modified nucleoside
  modified_base 9: mod_base = OTHER; note = 2'-fluoro-modified nucleoside
  modified_base 10: mod_base = OTHER; note = 2'-O-methyl modified nucleoside
  modified_base 11: mod_base = OTHER; note = 2'-fluoro-modified nucleoside
  modified_base 12: mod_base = OTHER; note = 2'-O-methyl modified nucleoside
  modified_base 13: mod_base = OTHER; note = 2'-O-methyl modified nucleoside
  modified_base 14: mod_base = OTHER; note = 2'-O-methyl modified nucleoside
  modified_base 15: mod_base = OTHER; note = 2'-O-methyl modified nucleoside
  modified_base 16: mod_base = OTHER; note = 2'-O-methyl modified nucleoside
  modified_base 17: mod_base = OTHER; note = 2'-O-methyl modified nucleoside
  modified_base 18: mod_base = OTHER; note = 2'-O-methyl modified nucleoside
  modified_base 19: mod_base = OTHER; note = 2'-O-methyl modified nucleoside with phosphorothioate linkage
  modified_base 20: mod_base = OTHER; note = 2'-O-methyl modified nucleoside with phosphorothioate linkage
  modified_base 21: mod_base = OTHER; note = 2'-O-methyl modified nucleoside
ataagggcatgtttgccaatt

SEQ ID NO: 12774 - RNA, 21 nt, synthetic construct
  source 1..21: mol_type = other RNA
  modified_base 1: mod_base = OTHER; note = 2'-O-methyl modified nucleoside with phosphorothioate linkage
  modified_base 2: mod_base = OTHER; note = 2'-O-methyl modified nucleoside with phosphorothioate linkage
  modified_base 3: mod_base = OTHER; note = 2'-O-methyl modified nucleoside
  modified_base 4: mod_base = OTHER; note = 2'-O-methyl modified nucleoside
  modified_base 5: mod_base = OTHER; note = 2'-fluoro-modified nucleoside
  modified_base 6: mod_base = OTHER; note = 2'-O-methyl modified nucleoside
  modified_base 7: mod_base = OTHER; note = 2'-fluoro-modified nucleoside
  modified_base 8: mod_base = OTHER; note = 2'-O-methyl modified nucleoside
  modified_base 9: mod_base = OTHER; note = 2'-fluoro-modified nucleoside
  modified_base 10: mod_base = OTHER; note = 2'-O-methyl modified nucleoside
  modified_base 11: mod_base = OTHER; note = 2'-O-methyl modified nucleoside
  modified_base 12: mod_base = OTHER; note = 2'-O-methyl modified nucleoside
  modified_base 13: mod_base = OTHER; note = 2'-O-methyl modified nucleoside
  modified_base 14: mod_base = OTHER; note = 2'-O-methyl modified nucleoside
  modified_base 15: mod_base = OTHER; note = 2'-O-methyl modified nucleoside
  modified_base 16: mod_base = OTHER; note = 2'-O-methyl modified nucleoside
  modified_base 17: mod_base = OTHER; note = 2'-O-methyl modified nucleoside
  modified_base 18: mod_base = OTHER; note = 2'-O-methyl modified nucleoside
  modified_base 19: mod_base = OTHER; note = 2'-O-methyl modified nucleoside with phosphorothioate linkage
  modified_base 20: mod_base = OTHER; note = 2'-O-methyl modified nucleoside with phosphorothioate linkage
  modified_base 21: mod_base = OTHER; note = 2'-O-methyl modified nucleoside
ataagggcatgtttgccaatt

SEQ ID NO: 12775 - RNA, 21 nt, synthetic construct
  source 1..21: mol_type = other RNA
  modified_base 1: mod_base = OTHER; note = 2'-O-methyl modified nucleoside with phosphorothioate linkage
  modified_base 2: mod_base = OTHER; note = 2'-O-methyl modified nucleoside with phosphorothioate linkage
  modified_base 3: mod_base = OTHER; note = 2'-O-methyl modified nucleoside
  modified_base 4: mod_base = OTHER; note = 2'-O-methyl modified nucleoside
  modified_base 5: mod_base = OTHER; note = 2'-fluoro-modified nucleoside
  modified_base 6: mod_base = OTHER; note = 2'-O-methyl modified nucleoside
  modified_base 7: mod_base = OTHER; note = 2'-fluoro-modified nucleoside
  modified_base 8: mod_base = OTHER; note = 2'-O-methyl modified nucleoside
  modified_base 9: mod_base = OTHER; note = 2'-fluoro-modified nucleoside
  modified_base 10: mod_base = OTHER; note = 2'-O-methyl modified nucleoside
  modified_base 11: mod_base = OTHER; note = 2'-fluoro-modified nucleoside
  modified_base 12: mod_base = OTHER; note = 2'-O-methyl modified nucleoside
  modified_base 13: mod_base = OTHER; note = 2'-O-methyl modified nucleoside
  modified_base 14: mod_base = OTHER; note = 2'-O-methyl modified nucleoside
  modified_base 15: mod_base = OTHER; note = 2'-O-methyl modified nucleoside
  modified_base 16: mod_base = OTHER; note = 2'-O-methyl modified nucleoside
  modified_base 17: mod_base = OTHER; note = 2'-O-methyl modified nucleoside
  modified_base 18: mod_base = OTHER; note = 2'-O-methyl modified nucleoside
  modified_base 19: mod_base = OTHER; note = 2'-O-methyl modified nucleoside with phosphorothioate linkage
  modified_base 20: mod_base = OTHER; note = 2'-O-methyl modified nucleoside with phosphorothioate linkage
  modified_base 21: mod_base = OTHER; note = 2'-O-methyl modified nucleoside
ataagggcatgtttgccaatt

SEQ ID NO: 12776 - RNA, 21 nt, synthetic construct
  source 1..21: mol_type = other RNA
  modified_base 1: mod_base = OTHER; note = 2'-O-methyl modified nucleoside with phosphorothioate linkage
  modified_base 2: mod_base = OTHER; note = 2'-O-methyl modified nucleoside with phosphorothioate linkage
  modified_base 3: mod_base = OTHER; note = 2'-O-methyl modified nucleoside
  modified_base 4: mod_base = OTHER; note = 2'-O-methyl modified nucleoside
  modified_base 5: mod_base = OTHER; note = 2'-fluoro-modified nucleoside
  modified_base 6: mod_base = OTHER; note = 2'-fluoro-modified nucleoside
  modified_base 7: mod_base = OTHER; note = 2'-O-methyl modified nucleoside
  modified_base 8: mod_base = OTHER; note = 2'-O-methyl modified nucleoside
  modified_base 9: mod_base = OTHER; note = 2'-fluoro-modified nucleoside
  modified_base 10: mod_base = OTHER; note = 2'-O-methyl modified nucleoside
  modified_base 11: mod_base = OTHER; note = 2'-O-methyl modified nucleoside
  modified_base 12: mod_base = OTHER; note = 2'-O-methyl modified nucleoside
  modified_base 13: mod_base = OTHER; note = 2'-O-methyl modified nucleoside
  modified_base 14: mod_base = OTHER; note = 2'-O-methyl modified nucleoside
  modified_base 15: mod_base = OTHER; note = 2'-O-methyl modified nucleoside
  modified_base 16: mod_base = OTHER; note = 2'-O-methyl modified nucleoside
  modified_base 17: mod_base = OTHER; note = 2'-O-methyl modified nucleoside
  modified_base 18: mod_base = OTHER; note = 2'-O-methyl modified nucleoside
  modified_base 19: mod_base = OTHER; note = 2'-O-methyl modified nucleoside with phosphorothioate linkage
  modified_base 20: mod_base = OTHER; note = 2'-O-methyl modified nucleoside with phosphorothioate linkage
  modified_base 21: mod_base = OTHER; note = 2'-O-methyl modified nucleoside
ataagggcatgtttgccaatt

SEQ ID NO: 12777 - RNA, 21 nt, synthetic construct
  source 1..21: mol_type = other RNA
  modified_base 1: mod_base = OTHER; note = 2'-O-methyl modified nucleoside with phosphorothioate linkage
  modified_base 2: mod_base = OTHER; note = 2'-O-methyl modified nucleoside with phosphorothioate linkage
  modified_base 3: mod_base = OTHER; note = 2'-O-methyl modified nucleoside
  modified_base 4: mod_base = OTHER; note = 2'-O-methyl modified nucleoside
  modified_base 5: mod_base = OTHER; note = 2'-O-methyl modified nucleoside
  modified_base 6: mod_base = OTHER; note = 2'-fluoro-modified nucleoside
  modified_base 7: mod_base = OTHER; note = 2'-O-methyl modified nucleoside
  modified_base 8: mod_base = OTHER; note = 2'-O-methyl modified nucleoside
  modified_base 9: mod_base = OTHER; note = 2'-fluoro-modified nucleoside
  modified_base 10: mod_base = OTHER; note = 2'-O-methyl modified nucleoside
  modified_base 11: mod_base = OTHER; note = 2'-fluoro-modified nucleoside
  modified_base 12: mod_base = OTHER; note = 2'-O-methyl modified nucleoside
  modified_base 13: mod_base = OTHER; note = 2'-O-methyl modified nucleoside
  modified_base 14: mod_base = OTHER; note = 2'-O-methyl modified nucleoside
  modified_base 15: mod_base = OTHER; note = 2'-O-methyl modified nucleoside
  modified_base 16: mod_base = OTHER; note = 2'-O-methyl modified nucleoside
  modified_base 17: mod_base = OTHER; note = 2'-O-methyl modified nucleoside
  modified_base 18: mod_base = OTHER; note = 2'-O-methyl modified nucleoside
  modified_base 19: mod_base = OTHER; note = 2'-O-methyl modified nucleoside with phosphorothioate linkage
  modified_base 20: mod_base = OTHER; note = 2'-O-methyl modified nucleoside with phosphorothioate linkage
  modified_base 21: mod_base = OTHER; note = 2'-O-methyl modified nucleoside
tctaccagttcatagatcatt

SEQ ID NO: 12778 - RNA, 21 nt, synthetic construct
  source 1..21: mol_type = other RNA
  modified_base 1: mod_base = OTHER; note = 2'-O-methyl modified nucleoside with phosphorothioate linkage
  modified_base 2: mod_base = OTHER; note = 2'-O-methyl modified nucleoside with phosphorothioate linkage
  modified_base 3: mod_base = OTHER; note = 2'-O-methyl modified nucleoside
  modified_base 4: mod_base = OTHER; note = 2'-O-methyl modified nucleoside
  modified_base 5: mod_base = OTHER; note = 2'-O-methyl modified nucleoside
  modified_base 6: mod_base = OTHER; note = 2'-fluoro-modified nucleoside
  modified_base 7: mod_base = OTHER; note = 2'-O-methyl modified nucleoside
  modified_base 8: mod_base = OTHER; note = 2'-O-methyl modified nucleoside
  modified_base 9: mod_base = OTHER; note = 2'-fluoro-modified nucleoside
  modified_base 10: mod_base = OTHER; note = 2'-fluoro-modified nucleoside
  modified_base 11: mod_base = OTHER; note = 2'-O-methyl modified nucleoside
  modified_base 12: mod_base = OTHER; note = 2'-O-methyl modified nucleoside
  modified_base 13: mod_base = OTHER; note = 2'-O-methyl modified nucleoside
  modified_base 14: mod_base = OTHER; note = 2'-O-methyl modified nucleoside
  modified_base 15: mod_base = OTHER; note = 2'-O-methyl modified nucleoside
  modified_base 16: mod_base = OTHER; note = 2'-O-methyl modified nucleoside
  modified_base 17: mod_base = OTHER; note = 2'-O-methyl modified nucleoside
  modified_base 18: mod_base = OTHER; note = 2'-O-methyl modified nucleoside
  modified_base 19: mod_base = OTHER; note = 2'-O-methyl modified nucleoside with phosphorothioate linkage
  modified_base 20: mod_base = OTHER; note = 2'-O-methyl modified nucleoside with phosphorothioate linkage
  modified_base 21: mod_base = OTHER; note = 2'-O-methyl modified nucleoside
tctaccagttcatagatcatt

SEQ ID NO: 12779 - RNA, 21 nt, synthetic construct
  source 1..21: mol_type = other RNA
  modified_base 1: mod_base = OTHER; note = 2'-O-methyl modified nucleoside with phosphorothioate linkage
  modified_base 2: mod_base = OTHER; note = 2'-O-methyl modified nucleoside with phosphorothioate linkage
  modified_base 3: mod_base = OTHER; note = 2'-O-methyl modified nucleoside
  modified_base 4: mod_base = OTHER; note = 2'-O-methyl modified nucleoside
  modified_base 5: mod_base = OTHER; note = 2'-fluoro-modified nucleoside
  modified_base 6: mod_base = OTHER; note = 2'-O-methyl modified nucleoside
  modified_base 7: mod_base = OTHER; note = 2'-O-methyl modified nucleoside
  modified_base 8: mod_base = OTHER; note = 2'-O-methyl modified nucleoside
  modified_base 9: mod_base = OTHER; note = 2'-fluoro-modified nucleoside
  modified_base 10: mod_base = OTHER; note = 2'-O-methyl modified nucleoside
  modified_base 11: mod_base = OTHER; note = 2'-fluoro-modified nucleoside
  modified_base 12: mod_base = OTHER; note = 2'-O-methyl modified nucleoside
  modified_base 13: mod_base = OTHER; note = 2'-O-methyl modified nucleoside
  modified_base 14: mod_base = OTHER; note = 2'-O-methyl modified nucleoside
  modified_base 15: mod_base = OTHER; note = 2'-O-methyl modified nucleoside
  modified_base 16: mod_base = OTHER; note = 2'-O-methyl modified nucleoside
  modified_base 17: mod_base = OTHER; note = 2'-O-methyl modified nucleoside
  modified_base 18: mod_base = OTHER; note = 2'-O-methyl modified nucleoside
  modified_base 19: mod_base = OTHER; note = 2'-O-methyl modified nucleoside with phosphorothioate linkage
  modified_base 20: mod_base = OTHER; note = 2'-O-methyl modified nucleoside with phosphorothioate linkage
  modified_base 21: mod_base = OTHER; note = 2'-O-methyl modified nucleoside
tctaccagttcatagatcatt

SEQ ID NO: 12780 - RNA, 21 nt, synthetic construct
  source 1..21: mol_type = other RNA
  modified_base 1: mod_base = OTHER; note = 2'-O-methyl modified nucleoside with phosphorothioate linkage
  modified_base 2: mod_base = OTHER; note = 2'-O-methyl modified nucleoside with phosphorothioate linkage
  modified_base 3: mod_base = OTHER; note = 2'-O-methyl modified nucleoside
  modified_base 4: mod_base = OTHER; note = 2'-O-methyl modified nucleoside
  modified_base 5: mod_base = OTHER; note = 2'-fluoro-modified nucleoside
  modified_base 6: mod_base = OTHER; note = 2'-O-methyl modified nucleoside
  modified_base 7: mod_base = OTHER; note = 2'-O-methyl modified nucleoside
  modified_base 8: mod_base = OTHER; note = 2'-O-methyl modified nucleoside
  modified_base 9: mod_base = OTHER; note = 2'-fluoro-modified nucleoside
  modified_base 10: mod_base = OTHER; note = 2'-fluoro-modified nucleoside
  modified_base 11: mod_base = OTHER; note = 2'-O-methyl modified nucleoside
  modified_base 12: mod_base = OTHER; note = 2'-O-methyl modified nucleoside
  modified_base 13: mod_base = OTHER; note = 2'-O-methyl modified nucleoside
  modified_base 14: mod_base = OTHER; note = 2'-O-methyl modified nucleoside
  modified_base 15: mod_base = OTHER; note = 2'-O-methyl modified nucleoside
  modified_base 16: mod_base = OTHER; note = 2'-O-methyl modified nucleoside
  modified_base 17: mod_base = OTHER; note = 2'-O-methyl modified nucleoside
  modified_base 18: mod_base = OTHER; note = 2'-O-methyl modified nucleoside
  modified_base 19: mod_base = OTHER; note = 2'-O-methyl modified nucleoside with phosphorothioate linkage
  modified_base 20: mod_base = OTHER; note = 2'-O-methyl modified nucleoside with phosphorothioate linkage
  modified_base 21: mod_base = OTHER; note = 2'-O-methyl modified nucleoside
tctaccagttcatagatcatt

SEQ ID NO: 12781 - RNA, 21 nt, synthetic construct
  source 1..21: mol_type = other RNA
  modified_base 1: mod_base = OTHER; note = 2'-O-methyl modified nucleoside with phosphorothioate linkage
  modified_base 2: mod_base = OTHER; note = 2'-O-methyl modified nucleoside with phosphorothioate linkage
  modified_base 3: mod_base = OTHER; note = 2'-O-methyl modified nucleoside
  modified_base 4: mod_base = OTHER; note = 2'-O-methyl modified nucleoside
  modified_base 5: mod_base = OTHER; note = 2'-fluoro-modified nucleoside
  modified_base 6: mod_base = OTHER; note = 2'-fluoro-modified nucleoside
  modified_base 7: mod_base = OTHER; note = 2'-O-methyl modified nucleoside
  modified_base 8: mod_base = OTHER; note = 2'-O-methyl modified nucleoside
  modified_base 9: mod_base = OTHER; note = 2'-fluoro-modified nucleoside
  modified_base 10: mod_base = OTHER; note = 2'-O-methyl modified nucleoside
  modified_base 11: mod_base = OTHER; note = 2'-O-methyl modified nucleoside
  modified_base 12: mod_base = OTHER; note = 2'-O-methyl modified nucleoside
  modified_base 13: mod_base = OTHER; note = 2'-O-methyl modified nucleoside
  modified_base 14: mod_base = OTHER; note = 2'-O-methyl modified nucleoside
  modified_base 15: mod_base = OTHER; note = 2'-O-methyl modified nucleoside
  modified_base 16: mod_base = OTHER; note = 2'-O-methyl modified nucleoside
  modified_base 17: mod_base = OTHER; note = 2'-O-methyl modified nucleoside
  modified_base 18: mod_base = OTHER; note = 2'-O-methyl modified nucleoside
  modified_base 19: mod_base = OTHER; note = 2'-O-methyl modified nucleoside with phosphorothioate linkage
  modified_base 20: mod_base = OTHER; note = 2'-O-methyl modified nucleoside with phosphorothioate linkage
  modified_base 21: mod_base = OTHER; note = 2'-O-methyl modified nucleoside
tctaccagttcatagatcatt

SEQ ID NO: 12782 - RNA, 21 nt, synthetic construct
  source 1..21: mol_type = other RNA
  modified_base 1: mod_base = OTHER; note = 2'-O-methyl modified nucleoside with phosphorothioate linkage
  modified_base 2: mod_base = OTHER; note = 2'-O-methyl modified nucleoside with phosphorothioate linkage
  modified_base 3: mod_base = OTHER; note = 2'-O-methyl modified nucleoside
  modified_base 4: mod_base = OTHER; note = 2'-O-methyl modified nucleoside
  modified_base 5: mod_base = OTHER; note = 2'-fluoro-modified nucleoside
  modified_base 6: mod_base = OTHER; note = 2'-fluoro-modified nucleoside
  modified_base 7: mod_base = OTHER; note = 2'-O-methyl modified nucleoside
  modified_base 8: mod_base = OTHER; note = 2'-O-methyl modified nucleoside
  modified_base 9: mod_base = OTHER; note = 2'-fluoro-modified nucleoside
  modified_base 10: mod_base = OTHER; note = 2'-fluoro-modified nucleoside
  modified_base 11: mod_base = OTHER; note = 2'-O-methyl modified nucleoside
  modified_base 12: mod_base = OTHER; note = 2'-O-methyl modified nucleoside
  modified_base 13: mod_base = OTHER; note = 2'-O-methyl modified nucleoside
  modified_base 14: mod_base = OTHER; note = 2'-O-methyl modified nucleoside
  modified_base 15: mod_base = OTHER; note = 2'-O-methyl modified nucleoside
  modified_base 16: mod_base = OTHER; note = 2'-O-methyl modified nucleoside
  modified_base 17: mod_base = OTHER; note = 2'-O-methyl modified nucleoside
  modified_base 18: mod_base = OTHER; note = 2'-O-methyl modified nucleoside
  modified_base 19: mod_base = OTHER; note = 2'-O-methyl modified nucleoside with phosphorothioate linkage
  modified_base 20: mod_base = OTHER; note = 2'-O-methyl modified nucleoside with phosphorothioate linkage
  modified_base 21: mod_base = OTHER; note = 2'-O-methyl modified nucleoside
tctaccagttcatagatcatt

SEQ ID NO: 12783 - RNA, 21 nt, synthetic construct
  source 1..21: mol_type = other RNA
  modified_base 1: mod_base = OTHER; note = 2'-O-methyl modified nucleoside with phosphorothioate linkage
  modified_base 2: mod_base = OTHER; note = 2'-O-methyl modified nucleoside with phosphorothioate linkage
  modified_base 3: mod_base = OTHER; note = 2'-O-methyl modified nucleoside
  modified_base 4: mod_base = OTHER; note = 2'-O-methyl modified nucleoside
  modified_base 5: mod_base = OTHER; note = 2'-fluoro-modified nucleoside
  modified_base 6: mod_base = OTHER; note = 2'-O-methyl modified nucleoside
  modified_base 7: mod_base = OTHER; note = 2'-O-methyl modified nucleoside
  modified_base 8: mod_base = OTHER; note = 2'-O-methyl modified nucleoside
  modified_base 9: mod_base = OTHER; note = 2'-fluoro-modified nucleoside
  modified_base 10: mod_base = OTHER; note = 2'-fluoro-modified nucleoside
  modified_base 11: mod_base = OTHER; note = 2'-O-methyl modified nucleoside
  modified_base 12: mod_base = OTHER; note = 2'-O-methyl modified nucleoside
  modified_base 13: mod_base = OTHER; note = 2'-O-methyl modified nucleoside
  modified_base 14: mod_base = OTHER; note = 2'-O-methyl modified nucleoside
  modified_base 15: mod_base = OTHER; note = 2'-O-methyl modified nucleoside
  modified_base 16: mod_base = OTHER; note = 2'-O-methyl modified nucleoside
  modified_base 17: mod_base = OTHER; note = 2'-O-methyl modified nucleoside
  modified_base 18: mod_base = OTHER; note = 2'-O-methyl modified nucleoside
  modified_base 19: mod_base = OTHER; note = 2'-O-methyl modified nucleoside with phosphorothioate linkage
  modified_base 20: mod_base = OTHER; note = 2'-O-methyl modified nucleoside with phosphorothioate linkage
  modified_base 21: mod_base = OTHER; note = 2'-O-methyl modified nucleoside
ctaccagttcatagatccatt

SEQ ID NO: 12784 - RNA, 21 nt, synthetic construct
  source 1..21: mol_type = other RNA
  modified_base 1: mod_base = OTHER; note = 2'-O-methyl modified nucleoside with phosphorothioate linkage
  modified_base 2: mod_base = OTHER; note = 2'-O-methyl modified nucleoside with phosphorothioate linkage
  modified_base 3: mod_base = OTHER; note = 2'-O-methyl modified nucleoside
  modified_base 4: mod_base = OTHER; note = 2'-O-methyl modified nucleoside
  modified_base 5: mod_base = OTHER; note = 2'-O-methyl modified nucleoside
  modified_base 6: mod_base = OTHER; note = 2'-O-methyl modified nucleoside
  modified_base 7: mod_base = OTHER; note = 2'-O-methyl modified nucleoside
  modified_base 8: mod_base = OTHER; note = 2'-fluoro-modified nucleoside
  modified_base 9: mod_base = OTHER; note = 2'-fluoro-modified nucleoside
  modified_base 10: mod_base = OTHER; note = 2'-O-methyl modified nucleoside
  modified_base 11: mod_base = OTHER; note = 2'-fluoro-modified nucleoside
  modified_base 12: mod_base = OTHER; note = 2'-O-methyl modified nucleoside
  modified_base 13: mod_base = OTHER; note = 2'-O-methyl modified nucleoside
  modified_base 14: mod_base = OTHER; note = 2'-O-methyl modified nucleoside
  modified_base 15: mod_base = OTHER; note = 2'-O-methyl modified nucleoside
  modified_base 16: mod_base = OTHER; note = 2'-O-methyl modified nucleoside
  modified_base 17: mod_base = OTHER; note = 2'-O-methyl modified nucleoside
  modified_base 18: mod_base = OTHER; note = 2'-O-methyl modified nucleoside
  modified_base 19: mod_base = OTHER; note = 2'-O-methyl modified nucleoside with phosphorothioate linkage
  modified_base 20: mod_base = OTHER; note = 2'-O-methyl modified nucleoside with phosphorothioate linkage
  modified_base 21: mod_base = OTHER; note = 2'-O-methyl modified nucleoside
acggaaagatgttctctaatt

SEQ ID NO: 12785 - RNA, 21 nt, synthetic construct
  source 1..21: mol_type = other RNA
  modified_base 1: mod_base = OTHER; note = 2'-O-methyl modified nucleoside with phosphorothioate linkage
  modified_base 2: mod_base = OTHER; note = 2'-O-methyl modified nucleoside with phosphorothioate linkage
  modified_base 3: mod_base = OTHER; note = 2'-O-methyl modified nucleoside
  modified_base 4: mod_base = OTHER; note = 2'-O-methyl modified nucleoside
  modified_base 5: mod_base = OTHER; note = 2'-O-methyl modified nucleoside
  modified_base 6: mod_base = OTHER; note = 2'-O-methyl modified nucleoside
  modified_base 7: mod_base = OTHER; note = 2'-fluoro-modified nucleoside
  modified_base 8: mod_base = OTHER; note = 2'-O-methyl modified nucleoside
  modified_base 9: mod_base = OTHER; note = 2'-fluoro-modified nucleoside
  modified_base 10: mod_base = OTHER; note = 2'-O-methyl modified nucleoside
  modified_base 11: mod_base = OTHER; note = 2'-fluoro-modified nucleoside
  modified_base 12: mod_base = OTHER; note = 2'-O-methyl modified nucleoside
  modified_base 13: mod_base = OTHER; note = 2'-O-methyl modified nucleoside
  modified_base 14: mod_base = OTHER; note = 2'-O-methyl modified nucleoside
  modified_base 15: mod_base = OTHER; note = 2'-O-methyl modified nucleoside
  modified_base 16: mod_base = OTHER; note = 2'-O-methyl modified nucleoside
  modified_base 17: mod_base = OTHER; note = 2'-O-methyl modified nucleoside
  modified_base 18: mod_base = OTHER; note = 2'-O-methyl modified nucleoside
  modified_base 19: mod_base = OTHER; note = 2'-O-methyl modified nucleoside with phosphorothioate linkage
  modified_base 20: mod_base = OTHER; note = 2'-O-methyl modified nucleoside with phosphorothioate linkage
  modified_base 21: mod_base = OTHER; note = 2'-O-methyl modified nucleoside
acggaaagatgttctctaatt

SEQ ID NO: 12786 - RNA, 21 nt, synthetic construct
  source 1..21: mol_type = other RNA
  modified_base 1: mod_base = OTHER; note = 2'-O-methyl modified nucleoside with phosphorothioate linkage
  modified_base 2: mod_base = OTHER; note = 2'-O-methyl modified nucleoside with phosphorothioate linkage
  modified_base 3: mod_base = OTHER; note = 2'-O-methyl modified nucleoside
  modified_base 4: mod_base = OTHER; note = 2'-O-methyl modified nucleoside
  modified_base 5: mod_base = OTHER; note = 2'-O-methyl modified nucleoside
  modified_base 6: mod_base = OTHER; note = 2'-fluoro-modified nucleoside
  modified_base 7: mod_base = OTHER; note = 2'-O-methyl modified nucleoside
  modified_base 8: mod_base = OTHER; note = 2'-O-methyl modified nucleoside
  modified_base 9: mod_base = OTHER; note = 2'-fluoro-modified nucleoside
  modified_base 10: mod_base = OTHER; note = 2'-O-methyl modified nucleoside
  modified_base 11: mod_base = OTHER; note = 2'-fluoro-modified nucleoside
  modified_base 12: mod_base = OTHER; note = 2'-O-methyl modified nucleoside
  modified_base 13: mod_base = OTHER; note = 2'-O-methyl modified nucleoside
  modified_base 14: mod_base = OTHER; note = 2'-O-methyl modified nucleoside
  modified_base 15: mod_base = OTHER; note = 2'-O-methyl modified nucleoside
  modified_base 16: mod_base = OTHER; note = 2'-O-methyl modified nucleoside
  modified_base 17: mod_base = OTHER; note = 2'-O-methyl modified nucleoside
  modified_base 18: mod_base = OTHER; note = 2'-O-methyl modified nucleoside
  modified_base 19: mod_base = OTHER; note = 2'-O-methyl modified nucleoside with phosphorothioate linkage
  modified_base 20: mod_base = OTHER; note = 2'-O-methyl modified nucleoside with phosphorothioate linkage
  modified_base 21: mod_base = OTHER; note = 2'-O-methyl modified nucleoside
acggaaagatgttctctaatt

SEQ ID NO: 12787 - RNA, 21 nt, synthetic construct
  source 1..21: mol_type = other RNA
  modified_base 1: mod_base = OTHER; note = 2'-O-methyl modified nucleoside with phosphorothioate linkage
  modified_base 2: mod_base = OTHER; note = 2'-O-methyl modified nucleoside with phosphorothioate linkage
  modified_base 3: mod_base = OTHER; note = 2'-O-methyl modified nucleoside
  modified_base 4: mod_base = OTHER; note = 2'-O-methyl modified nucleoside
  modified_base 5: mod_base = OTHER; note = 2'-O-methyl modified nucleoside
  modified_base 6: mod_base = OTHER; note = 2'-fluoro-modified nucleoside
  modified_base 7: mod_base = OTHER; note = 2'-O-methyl modified nucleoside
  modified_base 8: mod_base = OTHER; note = 2'-fluoro-modified nucleoside
  modified_base 9: mod_base = OTHER; note = 2'-fluoro-modified nucleoside
  modified_base 10: mod_base = OTHER; note = 2'-O-methyl modified nucleoside
  modified_base 11: mod_base = OTHER; note = 2'-O-methyl modified nucleoside
  modified_base 12: mod_base = OTHER; note = 2'-O-methyl modified nucleoside
  modified_base 13: mod_base = OTHER; note = 2'-O-methyl modified nucleoside
  modified_base 14: mod_base = OTHER; note = 2'-O-methyl modified nucleoside
  modified_base 15: mod_base = OTHER; note = 2'-O-methyl modified nucleoside
  modified_base 16: mod_base = OTHER; note = 2'-O-methyl modified nucleoside
  modified_base 17: mod_base = OTHER; note = 2'-O-methyl modified nucleoside
  modified_base 18: mod_base = OTHER; note = 2'-O-methyl modified nucleoside
  modified_base 19: mod_base = OTHER; note = 2'-O-methyl modified nucleoside with phosphorothioate linkage
  modified_base 20: mod_base = OTHER; note = 2'-O-methyl modified nucleoside with phosphorothioate linkage
  modified_base 21: mod_base = OTHER; note = 2'-O-methyl modified nucleoside
acggaaagatgttctctaatt

SEQ ID NO: 12788 - RNA, 21 nt, synthetic construct
  source 1..21: mol_type = other RNA
  modified_base 1: mod_base = OTHER; note = 2'-O-methyl modified nucleoside with phosphorothioate linkage
  modified_base 2: mod_base = OTHER; note = 2'-O-methyl modified nucleoside with phosphorothioate linkage
  modified_base 3: mod_base = OTHER; note = 2'-O-methyl modified nucleoside
  modified_base 4: mod_base = OTHER; note = 2'-O-methyl modified nucleoside
  modified_base 5: mod_base = OTHER; note = 2'-O-methyl modified nucleoside
  modified_base 6: mod_base = OTHER; note = 2'-fluoro-modified nucleoside
  modified_base 7: mod_base = OTHER; note = 2'-O-methyl modified nucleoside
  modified_base 8: mod_base = OTHER; note = 2'-fluoro-modified nucleoside
  modified_base 9: mod_base = OTHER; note = 2'-fluoro-modified nucleoside
  modified_base 10: mod_base = OTHER; note = 2'-O-methyl modified nucleoside
  modified_base 11: mod_base = OTHER; note = 2'-fluoro-modified nucleoside
  modified_base 12: mod_base = OTHER; note = 2'-O-methyl modified nucleoside
  modified_base 13: mod_base = OTHER; note = 2'-O-methyl modified nucleoside
  modified_base 14: mod_base = OTHER; note = 2'-O-methyl modified nucleoside
  modified_base 15: mod_base = OTHER; note = 2'-O-methyl modified nucleoside
  modified_base 16: mod_base = OTHER; note = 2'-O-methyl modified nucleoside
  modified_base 17: mod_base = OTHER; note = 2'-O-methyl modified nucleoside
  modified_base 18: mod_base = OTHER; note = 2'-O-methyl modified nucleoside
  modified_base 19: mod_base = OTHER; note = 2'-O-methyl modified nucleoside with phosphorothioate linkage
  modified_base 20: mod_base = OTHER; note = 2'-O-methyl modified nucleoside with phosphorothioate linkage
  modified_base 21: mod_base = OTHER; note = 2'-O-methyl modified nucleoside
acggaaagatgttctctaatt

SEQ ID NO: 12789 - RNA, 21 nt, synthetic construct
  source 1..21: mol_type = other RNA
  modified_base 1: mod_base = OTHER; note = 2'-O-methyl modified nucleoside with phosphorothioate linkage
  modified_base 2: mod_base = OTHER; note = 2'-O-methyl modified nucleoside with phosphorothioate linkage
  modified_base 3: mod_base = OTHER; note = 2'-O-methyl modified nucleoside
  modified_base 4: mod_base = OTHER; note = 2'-O-methyl modified nucleoside
  modified_base 5: mod_base = OTHER; note = 2'-O-methyl modified nucleoside
  modified_base 6: mod_base = OTHER; note = 2'-fluoro-modified nucleoside
  modified_base 7: mod_base = OTHER; note = 2'-fluoro-modified nucleoside
  modified_base 8: mod_base = OTHER; note = 2'-O-methyl modified nucleoside
  modified_base 9: mod_base = OTHER; note = 2'-fluoro-modified nucleoside
  modified_base 10: mod_base = OTHER; note = 2'-O-methyl modified nucleoside
  modified_base 11: mod_base = OTHER; note = 2'-O-methyl modified nucleoside
  modified_base 12: mod_base = OTHER; note = 2'-O-methyl modified nucleoside
  modified_base 13: mod_base = OTHER; note = 2'-O-methyl modified nucleoside
  modified_base 14: mod_base = OTHER; note = 2'-O-methyl modified nucleoside
  modified_base 15: mod_base = OTHER; note = 2'-O-methyl modified nucleoside
  modified_base 16: mod_base = OTHER; note = 2'-O-methyl modified nucleoside
  modified_base 17: mod_base = OTHER; note = 2'-O-methyl modified nucleoside
  modified_base 18: mod_base = OTHER; note = 2'-O-methyl modified nucleoside
  modified_base 19: mod_base = OTHER; note = 2'-O-methyl modified nucleoside with phosphorothioate linkage
  modified_base 20: mod_base = OTHER; note = 2'-O-methyl modified nucleoside with phosphorothioate linkage
  modified_base 21: mod_base = OTHER; note = 2'-O-methyl modified nucleoside
acggaaagatgttctctaatt

SEQ ID NO: 12790 - RNA, 21 nt, synthetic construct
  source 1..21: mol_type = other RNA
  modified_base 1: mod_base = OTHER; note = 2'-O-methyl modified nucleoside with phosphorothioate linkage
  modified_base 2: mod_base = OTHER; note = 2'-O-methyl modified nucleoside with phosphorothioate linkage
  modified_base 3: mod_base = OTHER; note = 2'-O-methyl modified nucleoside
  modified_base 4: mod_base = OTHER; note = 2'-O-methyl modified nucleoside
  modified_base 5: mod_base = OTHER; note = 2'-O-methyl modified nucleoside
  modified_base 6: mod_base = OTHER; note = 2'-fluoro-modified nucleoside
  modified_base 7: mod_base = OTHER; note = 2'-fluoro-modified nucleoside
  modified_base 8: mod_base = OTHER; note = 2'-O-methyl modified nucleoside
  modified_base 9: mod_base = OTHER; note = 2'-fluoro-modified nucleoside
  modified_base 10: mod_base = OTHER; note = 2'-O-methyl modified nucleoside
  modified_base 11: mod_base = OTHER; note = 2'-fluoro-modified nucleoside
  modified_base 12: mod_base = OTHER; note = 2'-O-methyl modified nucleoside
  modified_base 13: mod_base = OTHER; note = 2'-O-methyl modified nucleoside
  modified_base 14: mod_base = OTHER; note = 2'-O-methyl modified nucleoside
  modified_base 15: mod_base = OTHER; note = 2'-O-methyl modified nucleoside
  modified_base 16: mod_base = OTHER; note = 2'-O-methyl modified nucleoside
  modified_base 17: mod_base = OTHER; note = 2'-O-methyl modified nucleoside
  modified_base 18: mod_base = OTHER; note = 2'-O-methyl modified nucleoside
  modified_base 19: mod_base = OTHER; note = 2'-O-methyl modified nucleoside with phosphorothioate linkage
  modified_base 20: mod_base = OTHER; note = 2'-O-methyl modified nucleoside with phosphorothioate linkage
  modified_base 21: mod_base = OTHER; note = 2'-O-methyl modified nucleoside
acggaaagatgttctctaatt

SEQ ID NO: 12791 - RNA, 21 nt, synthetic construct
  source 1..21: mol_type = other RNA
  modified_base 1: mod_base = OTHER; note = 2'-O-methyl modified nucleoside with phosphorothioate linkage
  modified_base 2: mod_base = OTHER; note = 2'-O-methyl modified nucleoside with phosphorothioate linkage
  modified_base 3: mod_base = OTHER; note = 2'-O-methyl modified nucleoside
  modified_base 4: mod_base = OTHER; note = 2'-O-methyl modified nucleoside
  modified_base 5: mod_base = OTHER; note = 2'-O-methyl modified nucleoside
  modified_base 6: mod_base = OTHER; note = 2'-fluoro-modified nucleoside
  modified_base 7: mod_base = OTHER; note = 2'-fluoro-modified nucleoside
  modified_base 8: mod_base = OTHER; note = 2'-fluoro-modified nucleoside
  modified_base 9: mod_base = OTHER; note = 2'-fluoro-modified nucleoside
  modified_base 10: mod_base = OTHER; note = 2'-O-methyl modified nucleoside
  modified_base 11: mod_base = OTHER; note = 2'-O-methyl modified nucleoside
  modified_base 12: mod_base = OTHER; note = 2'-O-methyl modified nucleoside
  modified_base 13: mod_base = OTHER; note = 2'-O-methyl modified nucleoside
  modified_base 14: mod_base = OTHER; note = 2'-O-methyl modified nucleoside
  modified_base 15: mod_base = OTHER; note = 2'-O-methyl modified nucleoside
  modified_base 16: mod_base = OTHER; note = 2'-O-methyl modified nucleoside
  modified_base 17: mod_base = OTHER; note = 2'-O-methyl modified nucleoside
  modified_base 18: mod_base = OTHER; note = 2'-O-methyl modified nucleoside
  modified_base 19: mod_base = OTHER; note = 2'-O-methyl modified nucleoside with phosphorothioate linkage
  modified_base 20: mod_base = OTHER; note = 2'-O-methyl modified nucleoside with phosphorothioate linkage
  modified_base 21: mod_base = OTHER; note = 2'-O-methyl modified nucleoside
acggaaagatgttctctaatt

SEQ ID NO: 12792 - RNA, 21 nt, synthetic construct
  source 1..21: mol_type = other RNA
  modified_base 1: mod_base = OTHER; note = 2'-O-methyl modified nucleoside with phosphorothioate linkage
  modified_base 2: mod_base = OTHER; note = 2'-O-methyl modified nucleoside with phosphorothioate linkage
  modified_base 3: mod_base = OTHER; note = 2'-O-methyl modified nucleoside
  modified_base 4: mod_base = OTHER; note = 2'-O-methyl modified nucleoside
  modified_base 5: mod_base = OTHER; note = 2'-O-methyl modified nucleoside
  modified_base 6: mod_base = OTHER; note = 2'-fluoro-modified nucleoside
  modified_base 7: mod_base = OTHER; note = 2'-fluoro-modified nucleoside
  modified_base 8: mod_base = OTHER; note = 2'-fluoro-modified nucleoside
  modified_base 9: mod_base = OTHER; note = 2'-fluoro-modified nucleoside
  modified_base 10: mod_base = OTHER; note = 2'-O-methyl modified nucleoside
  modified_base 11: mod_base = OTHER; note = 2'-fluoro-modified nucleoside
  modified_base 12: mod_base = OTHER; note = 2'-O-methyl modified nucleoside
  modified_base 13: mod_base = OTHER; note = 2'-O-methyl modified nucleoside
  modified_base 14: mod_base = OTHER; note = 2'-O-methyl modified nucleoside
  modified_base 15: mod_base = OTHER; note = 2'-O-methyl modified nucleoside
  modified_base 16: mod_base = OTHER; note = 2'-O-methyl modified nucleoside
  modified_base 17: mod_base = OTHER; note = 2'-O-methyl modified nucleoside
  modified_base 18: mod_base = OTHER; note = 2'-O-methyl modified nucleoside
  modified_base 19: mod_base = OTHER; note = 2'-O-methyl modified nucleoside with phosphorothioate linkage
  modified_base 20: mod_base = OTHER; note = 2'-O-methyl modified nucleoside with phosphorothioate linkage
  modified_base 21: mod_base = OTHER; note = 2'-O-methyl modified nucleoside
acggaaagatgttctctaatt

SEQ ID NO: 12793 - RNA, 21 nt, synthetic construct
  source 1..21: mol_type = other RNA
  modified_base 1: mod_base = OTHER; note = 2'-O-methyl modified nucleoside with phosphorothioate linkage
  modified_base 2: mod_base = OTHER; note = 2'-O-methyl modified nucleoside with phosphorothioate linkage
  modified_base 3: mod_base = OTHER; note = 2'-O-methyl modified nucleoside
  modified_base 4: mod_base = OTHER; note = 2'-O-methyl modified nucleoside
  modified_base 5: mod_base = OTHER; note = 2'-fluoro-modified nucleoside
  modified_base 6: mod_base = OTHER; note = 2'-O-methyl modified nucleoside
  modified_base 7: mod_base = OTHER; note = 2'-O-methyl modified nucleoside
  modified_base 8: mod_base = OTHER; note = 2'-O-methyl modified nucleoside
  modified_base 9: mod_base = OTHER; note = 2'-fluoro-modified nucleoside
  modified_base 10: mod_base = OTHER; note = 2'-O-methyl modified nucleoside
  modified_base 11: mod_base = OTHER; note = 2'-fluoro-modified nucleoside
  modified_base 12: mod_base = OTHER; note = 2'-O-methyl modified nucleoside
  modified_base 13: mod_base = OTHER; note = 2'-O-methyl modified nucleoside
  modified_base 14: mod_base = OTHER; note = 2'-O-methyl modified nucleoside
  modified_base 15: mod_base = OTHER; note = 2'-O-methyl modified nucleoside
  modified_base 16: mod_base = OTHER; note = 2'-O-methyl modified nucleoside
  modified_base 17: mod_base = OTHER; note = 2'-O-methyl modified nucleoside
  modified_base 18: mod_base = OTHER; note = 2'-O-methyl modified nucleoside
  modified_base 19: mod_base = OTHER; note = 2'-O-methyl modified nucleoside with phosphorothioate linkage
  modified_base 20: mod_base = OTHER; note = 2'-O-methyl modified nucleoside with phosphorothioate linkage
  modified_base 21: mod_base = OTHER; note = 2'-O-methyl modified nucleoside
acggaaagatgttctctaatt

SEQ ID NO: 12794 - RNA, 21 nt, synthetic construct
  source 1..21: mol_type = other RNA
  modified_base 1: mod_base = OTHER; note = 2'-O-methyl modified nucleoside with phosphorothioate linkage
  modified_base 2: mod_base = OTHER; note = 2'-O-methyl modified nucleoside with phosphorothioate linkage
  modified_base 3: mod_base = OTHER; note = 2'-O-methyl modified nucleoside
  modified_base 4: mod_base = OTHER; note = 2'-O-methyl modified nucleoside
  modified_base 5: mod_base = OTHER; note = 2'-fluoro-modified nucleoside
  modified_base 6: mod_base = OTHER; note = 2'-O-methyl modified nucleoside
  modified_base 7: mod_base = OTHER; note = 2'-O-methyl modified nucleoside
  modified_base 8: mod_base = OTHER; note = 2'-fluoro-modified nucleoside
  modified_base 9: mod_base = OTHER; note = 2'-fluoro-modified nucleoside
  modified_base 10: mod_base = OTHER; note = 2'-O-methyl modified nucleoside
  modified_base 11: mod_base = OTHER; note = 2'-O-methyl modified nucleoside
  modified_base 12: mod_base = OTHER; note = 2'-O-methyl modified nucleoside
  modified_base 13: mod_base = OTHER; note = 2'-O-methyl modified nucleoside
  modified_base 14: mod_base = OTHER; note = 2'-O-methyl modified nucleoside
  modified_base 15: mod_base = OTHER; note = 2'-O-methyl modified nucleoside
  modified_base 16: mod_base = OTHER; note = 2'-O-methyl modified nucleoside
  modified_base 17: mod_base = OTHER; note = 2'-O-methyl modified nucleoside
  modified_base 18: mod_base = OTHER; note = 2'-O-methyl modified nucleoside
  modified_base 19: mod_base = OTHER; note = 2'-O-methyl modified nucleoside with phosphorothioate linkage
  modified_base 20: mod_base = OTHER; note = 2'-O-methyl modified nucleoside with phosphorothioate linkage
  modified_base 21: mod_base = OTHER; note = 2'-O-methyl modified nucleoside
acggaaagatgttctctaatt

SEQ ID NO: 12795 - RNA, 21 nt, synthetic construct
  source 1..21: mol_type = other RNA
  modified_base 1: mod_base = OTHER; note = 2'-O-methyl modified nucleoside with phosphorothioate linkage
  modified_base 2: mod_base = OTHER; note = 2'-O-methyl modified nucleoside with phosphorothioate linkage
  modified_base 3: mod_base = OTHER; note = 2'-O-methyl modified nucleoside
  modified_base 4: mod_base = OTHER; note = 2'-O-methyl modified nucleoside
  modified_base 5: mod_base = OTHER; note = 2'-fluoro-modified nucleoside
  modified_base 6: mod_base = OTHER; note = 2'-O-methyl modified nucleoside
  modified_base 7: mod_base = OTHER; note = 2'-O-methyl modified nucleoside
  modified_base 8: mod_base = OTHER; note = 2'-fluoro-modified nucleoside
  modified_base 9: mod_base = OTHER; note = 2'-fluoro-modified nucleoside
  modified_base 10: mod_base = OTHER; note = 2'-O-methyl modified nucleoside
  modified_base 11: mod_base = OTHER; note = 2'-fluoro-modified nucleoside
  modified_base 12: mod_base = OTHER; note = 2'-O-methyl modified nucleoside
  modified_base 13: mod_base = OTHER; note = 2'-O-methyl modified nucleoside
  modified_base 14: mod_base = OTHER; note = 2'-O-methyl modified nucleoside
  modified_base 15: mod_base = OTHER; note = 2'-O-methyl modified nucleoside
  modified_base 16: mod_base = OTHER; note = 2'-O-methyl modified nucleoside
  modified_base 17: mod_base = OTHER; note = 2'-O-methyl modified nucleoside
  modified_base 18: mod_base = OTHER; note = 2'-O-methyl modified nucleoside
  modified_base 19: mod_base = OTHER; note = 2'-O-methyl modified nucleoside with phosphorothioate linkage
  modified_base 20: mod_base = OTHER; note = 2'-O-methyl modified nucleoside with phosphorothioate linkage
  modified_base 21: mod_base = OTHER; note = 2'-O-methyl modified nucleoside
acggaaagatgttctctaatt

SEQ ID NO: 12796 - RNA, 21 nt, synthetic construct
  source 1..21: mol_type = other RNA
  modified_base 1: mod_base = OTHER; note = 2'-O-methyl modified nucleoside with phosphorothioate linkage
  modified_base 2: mod_base = OTHER; note = 2'-O-methyl modified nucleoside with phosphorothioate linkage
  modified_base 3: mod_base = OTHER; note = 2'-O-methyl modified nucleoside
  modified_base 4: mod_base = OTHER; note = 2'-O-methyl modified nucleoside
  modified_base 5: mod_base = OTHER; note = 2'-fluoro-modified nucleoside
  modified_base 6: mod_base = OTHER; note = 2'-O-methyl modified nucleoside
  modified_base 7: mod_base = OTHER; note = 2'-fluoro-modified nucleoside
  modified_base 8: mod_base = OTHER; note = 2'-O-methyl modified nucleoside
  modified_base 9: mod_base = OTHER; note = 2'-fluoro-modified nucleoside
  modified_base 10: mod_base = OTHER; note = 2'-O-methyl modified nucleoside
  modified_base 11: mod_base = OTHER; note = 2'-O-methyl modified nucleoside
  modified_base 12: mod_base = OTHER; note = 2'-O-methyl modified nucleoside
  modified_base 13: mod_base = OTHER; note = 2'-O-methyl modified nucleoside
  modified_base 14: mod_base = OTHER; note = 2'-O-methyl modified nucleoside
  modified_base 15: mod_base = OTHER; note = 2'-O-methyl modified nucleoside
  modified_base 16: mod_base = OTHER; note = 2'-O-methyl modified nucleoside
  modified_base 17: mod_base = OTHER; note = 2'-O-methyl modified nucleoside
  modified_base 18: mod_base = OTHER; note = 2'-O-methyl modified nucleoside
  modified_base 19: mod_base = OTHER; note = 2'-O-methyl modified nucleoside with phosphorothioate linkage
  modified_base 20: mod_base = OTHER; note = 2'-O-methyl modified nucleoside with phosphorothioate linkage
  modified_base 21: mod_base = OTHER; note = 2'-O-methyl modified nucleoside
acggaaagatgttctctaatt

SEQ ID NO: 12797 - RNA, 21 nt, synthetic construct
  source 1..21: mol_type = other RNA
  modified_base 1: mod_base = OTHER; note = 2'-O-methyl modified nucleoside with phosphorothioate linkage
  modified_base 2: mod_base = OTHER; note = 2'-O-methyl modified nucleoside with phosphorothioate linkage
  modified_base 3: mod_base = OTHER; note = 2'-O-methyl modified nucleoside
  modified_base 4: mod_base = OTHER; note = 2'-O-methyl modified nucleoside
  modified_base 5: mod_base = OTHER; note = 2'-fluoro-modified nucleoside
  modified_base 6: mod_base = OTHER; note = 2'-O-methyl modified nucleoside
  modified_base 7: mod_base = OTHER; note = 2'-fluoro-modified nucleoside
  modified_base 8: mod_base = OTHER; note = 2'-O-methyl modified nucleoside
  modified_base 9: mod_base = OTHER; note = 2'-fluoro-modified nucleoside
  modified_base 10: mod_base = OTHER; note = 2'-O-methyl modified nucleoside
  modified_base 11: mod_base = OTHER; note = 2'-fluoro-modified nucleoside
  modified_base 12: mod_base = OTHER; note = 2'-O-methyl modified nucleoside
  modified_base 13: mod_base = OTHER; note = 2'-O-methyl modified nucleoside
  modified_base 14: mod_base = OTHER; note = 2'-O-methyl modified nucleoside
  modified_base 15: mod_base = OTHER; note = 2'-O-methyl modified nucleoside
  modified_base 16: mod_base = OTHER; note = 2'-O-methyl modified nucleoside
  modified_base 17: mod_base = OTHER; note = 2'-O-methyl modified nucleoside
  modified_base 18: mod_base = OTHER; note = 2'-O-methyl modified nucleoside
  modified_base 19: mod_base = OTHER; note = 2'-O-methyl modified nucleoside with phosphorothioate linkage
  modified_base 20: mod_base = OTHER; note = 2'-O-methyl modified nucleoside with phosphorothioate linkage
  modified_base 21: mod_base = OTHER; note = 2'-O-methyl modified nucleoside
acggaaagatgttctctaatt

SEQ ID NO: 12798 - RNA, 21 nt, synthetic construct
  source 1..21: mol_type = other RNA
  modified_base 1: mod_base = OTHER; note = 2'-O-methyl modified nucleoside with phosphorothioate linkage
  modified_base 2: mod_base = OTHER; note = 2'-O-methyl modified nucleoside with phosphorothioate linkage
  modified_base 3: mod_base = OTHER; note = 2'-O-methyl modified nucleoside
  modified_base 4: mod_base = OTHER; note = 2'-O-methyl modified nucleoside
  modified_base 5: mod_base = OTHER; note = 2'-fluoro-modified nucleoside
  modified_base 6: mod_base = OTHER; note = 2'-fluoro-modified nucleoside
  modified_base 7: mod_base = OTHER; note = 2'-O-methyl modified nucleoside
  modified_base 8: mod_base = OTHER; note = 2'-O-methyl modified nucleoside
  modified_base 9: mod_base = OTHER; note = 2'-fluoro-modified nucleoside
  modified_base 10: mod_base = OTHER; note = 2'-O-methyl modified nucleoside
  modified_base 11: mod_base = OTHER; note = 2'-O-methyl modified nucleoside
  modified_base 12: mod_base = OTHER; note = 2'-O-methyl modified nucleoside
  modified_base 13: mod_base = OTHER; note = 2'-O-methyl modified nucleoside
  modified_base 14: mod_base = OTHER; note = 2'-O-methyl modified nucleoside
  modified_base 15: mod_base = OTHER; note = 2'-O-methyl modified nucleoside
  modified_base 16: mod_base = OTHER; note = 2'-O-methyl modified nucleoside
  modified_base 17: mod_base = OTHER; note = 2'-O-methyl modified nucleoside
  modified_base 18: mod_base = OTHER; note = 2'-O-methyl modified nucleoside
  modified_base 19: mod_base = OTHER; note = 2'-O-methyl modified nucleoside with phosphorothioate linkage
  modified_base 20: mod_base = OTHER; note = 2'-O-methyl modified nucleoside with phosphorothioate linkage
  modified_base 21: mod_base = OTHER; note = 2'-O-methyl modified nucleoside
acggaaagatgttctctaatt

SEQ ID NO: 12799 - RNA, 21 nt, synthetic construct
  source 1..21: mol_type = other RNA
  modified_base 1: mod_base = OTHER; note = 2'-O-methyl modified nucleoside with phosphorothioate linkage
  modified_base 2: mod_base = OTHER; note = 2'-O-methyl modified nucleoside with phosphorothioate linkage
  modified_base 3: mod_base = OTHER; note = 2'-O-methyl modified nucleoside
  modified_base 4: mod_base = OTHER; note = 2'-O-methyl modified nucleoside
  modified_base 5: mod_base = OTHER; note = 2'-fluoro-modified nucleoside
  modified_base 6: mod_base = OTHER; note = 2'-fluoro-modified nucleoside
  modified_base 7: mod_base = OTHER; note = 2'-O-methyl modified nucleoside
  modified_base 8: mod_base = OTHER; note = 2'-O-methyl modified nucleoside
  modified_base 9: mod_base = OTHER; note = 2'-fluoro-modified nucleoside
  modified_base 10: mod_base = OTHER; note = 2'-O-methyl modified nucleoside
  modified_base 11: mod_base = OTHER; note = 2'-fluoro-modified nucleoside
  modified_base 12: mod_base = OTHER; note = 2'-O-methyl modified nucleoside
  modified_base 13: mod_base = OTHER; note = 2'-O-methyl modified nucleoside
  modified_base 14: mod_base = OTHER; note = 2'-O-methyl modified nucleoside
  modified_base 15: mod_base = OTHER; note = 2'-O-methyl modified nucleoside
  modified_base 16: mod_base = OTHER; note = 2'-O-methyl modified nucleoside
  modified_base 17: mod_base = OTHER; note = 2'-O-methyl modified nucleoside
  modified_base 18: mod_base = OTHER; note = 2'-O-methyl modified nucleoside
  modified_base 19: mod_base = OTHER; note = 2'-O-methyl modified nucleoside with phosphorothioate linkage
  modified_base 20: mod_base = OTHER; note = 2'-O-methyl modified nucleoside with phosphorothioate linkage
  modified_base 21: mod_base = OTHER; note = 2'-O-methyl modified nucleoside
acggaaagatgttctctaatt

SEQ ID NO: 12800 - RNA, 21 nt, synthetic construct
  source 1..21: mol_type = other RNA
  modified_base 1: mod_base = OTHER; note = 2'-O-methyl modified nucleoside with phosphorothioate linkage
  modified_base 2: mod_base = OTHER; note = 2'-O-methyl modified nucleoside with phosphorothioate linkage
  modified_base 3: mod_base = OTHER; note = 2'-O-methyl modified nucleoside
  modified_base 4: mod_base = OTHER; note = 2'-O-methyl modified nucleoside
  modified_base 5: mod_base = OTHER; note = 2'-fluoro-modified nucleoside
  modified_base 6: mod_base = OTHER; note = 2'-fluoro-modified nucleoside
  modified_base 7: mod_base = OTHER; note = 2'-O-methyl modified nucleoside
  modified_base 8: mod_base = OTHER; note = 2'-fluoro-modified nucleoside
  modified_base 9: mod_base = OTHER; note = 2'-fluoro-modified nucleoside
  modified_base 10: mod_base = OTHER; note = 2'-O-methyl modified nucleoside
  modified_base 11: mod_base = OTHER; note = 2'-O-methyl modified nucleoside
  modified_base 12: mod_base = OTHER; note = 2'-O-methyl modified nucleoside
  modified_base 13: mod_base = OTHER; note = 2'-O-methyl modified nucleoside
  modified_base 14: mod_base = OTHER; note = 2'-O-methyl modified nucleoside
  modified_base 15: mod_base = OTHER; note = 2'-O-methyl modified nucleoside
  modified_base 16: mod_base = OTHER; note = 2'-O-methyl modified nucleoside
  modified_base 17: mod_base = OTHER; note = 2'-O-methyl modified nucleoside
  modified_base 18: mod_base = OTHER; note = 2'-O-methyl modified nucleoside
  modified_base 19: mod_base = OTHER; note = 2'-O-methyl modified nucleoside with phosphorothioate linkage
  modified_base 20: mod_base = OTHER; note = 2'-O-methyl modified nucleoside with phosphorothioate linkage
  modified_base 21: mod_base = OTHER; note = 2'-O-methyl modified nucleoside
acggaaagatgttctctaatt

SEQ ID NO: 12801 - RNA, 21 nt, synthetic construct
  source 1..21: mol_type = other RNA
  modified_base 1: mod_base = OTHER; note = 2'-O-methyl modified nucleoside with phosphorothioate linkage
  modified_base 2: mod_base = OTHER; note = 2'-O-methyl modified nucleoside with phosphorothioate linkage
  modified_base 3: mod_base = OTHER; note = 2'-O-methyl modified nucleoside
  modified_base 4: mod_base = OTHER; note = 2'-O-methyl modified nucleoside
  modified_base 5: mod_base = OTHER; note = 2'-fluoro-modified nucleoside
  modified_base 6: mod_base = OTHER; note = 2'-fluoro-modified nucleoside
  modified_base 7: mod_base = OTHER; note = 2'-fluoro-modified nucleoside
  modified_base 8: mod_base = OTHER; note = 2'-fluoro-modified nucleoside
  modified_base 9: mod_base = OTHER; note = 2'-fluoro-modified nucleoside
  modified_base 10: mod_base = OTHER; note = 2'-O-methyl modified nucleoside
  modified_base 11: mod_base = OTHER; note = 2'-O-methyl modified nucleoside
  modified_base 12: mod_base = OTHER; note = 2'-O-methyl modified nucleoside
  modified_base 13: mod_base = OTHER; note = 2'-O-methyl modified nucleoside
  modified_base 14: mod_base = OTHER; note = 2'-O-methyl modified nucleoside
  modified_base 15: mod_base = OTHER; note = 2'-O-methyl modified nucleoside
  modified_base 16: mod_base = OTHER; note = 2'-O-methyl modified nucleoside
  modified_base 17: mod_base = OTHER; note = 2'-O-methyl modified nucleoside
  modified_base 18: mod_base = OTHER; note = 2'-O-methyl modified nucleoside
  modified_base 19: mod_base = OTHER; note = 2'-O-methyl modified nucleoside with phosphorothioate linkage
  modified_base 20: mod_base = OTHER; note = 2'-O-methyl modified nucleoside with phosphorothioate linkage
  modified_base 21: mod_base = OTHER; note = 2'-O-methyl modified nucleoside
acggaaagatgttctctaatt

SEQ ID NO: 12802 - RNA, 21 nt, synthetic construct
  source 1..21: mol_type = other RNA
  modified_base 1: mod_base = OTHER; note = 2'-O-methyl modified nucleoside with phosphorothioate linkage
  modified_base 2: mod_base = OTHER; note = 2'-O-methyl modified nucleoside with phosphorothioate linkage
  modified_base 3: mod_base = OTHER; note = 2'-O-methyl modified nucleoside
  modified_base 4: mod_base = OTHER; note = 2'-O-methyl modified nucleoside
  modified_base 5: mod_base = OTHER; note = 2'-fluoro-modified nucleoside
  modified_base 6: mod_base = OTHER; note = 2'-O-methyl modified nucleoside
  modified_base 7: mod_base = OTHER; note = 2'-O-methyl modified nucleoside
  modified_base 8: mod_base = OTHER; note = 2'-O-methyl modified nucleoside
  modified_base 9: mod_base = OTHER; note = 2'-fluoro-modified nucleoside
  modified_base 10: mod_base = OTHER; note = 2'-fluoro-modified nucleoside
  modified_base 11: mod_base = OTHER; note = 2'-O-methyl modified nucleoside
  modified_base 12: mod_base = OTHER; note = 2'-O-methyl modified nucleoside
  modified_base 13: mod_base = OTHER; note = 2'-O-methyl modified nucleoside
  modified_base 14: mod_base = OTHER; note = 2'-O-methyl modified nucleoside
  modified_base 15: mod_base = OTHER; note = 2'-O-methyl modified nucleoside
  modified_base 16: mod_base = OTHER; note = 2'-O-methyl modified nucleoside
  modified_base 17: mod_base = OTHER; note = 2'-O-methyl modified nucleoside
  modified_base 18: mod_base = OTHER; note = 2'-O-methyl modified nucleoside
  modified_base 19: mod_base = OTHER; note = 2'-O-methyl modified nucleoside with phosphorothioate linkage
  modified_base 20: mod_base = OTHER; note = 2'-O-methyl modified nucleoside with phosphorothioate linkage
  modified_base 21: mod_base = OTHER; note = 2'-O-methyl modified nucleoside
tatagttgaattacttcgatt

SEQ ID NO: 12803 - RNA, 21 nt, synthetic construct
  source 1..21: mol_type = other RNA
  modified_base 1: mod_base = OTHER; note = 2'-O-methyl modified nucleoside with phosphorothioate linkage
  modified_base 2: mod_base = OTHER; note = 2'-O-methyl modified nucleoside with phosphorothioate linkage
  modified_base 3: mod_base = OTHER; note = 2'-O-methyl modified nucleoside
  modified_base 4: mod_base = OTHER; note = 2'-O-methyl modified nucleoside
  modified_base 5: mod_base = OTHER; note = 2'-O-methyl modified nucleoside
  modified_base 6: mod_base = OTHER; note = 2'-O-methyl modified nucleoside
  modified_base 7: mod_base = OTHER; note = 2'-O-methyl modified nucleoside
  modified_base 8: mod_base = OTHER; note = 2'-fluoro-modified nucleoside
  modified_base 9: mod_base = OTHER; note = 2'-fluoro-modified nucleoside
  modified_base 10: mod_base = OTHER; note = 2'-O-methyl modified nucleoside
  modified_base 11: mod_base = OTHER; note = 2'-O-methyl modified nucleoside
  modified_base 12: mod_base = OTHER; note = 2'-O-methyl modified nucleoside
  modified_base 13: mod_base = OTHER; note = 2'-O-methyl modified nucleoside
  modified_base 14: mod_base = OTHER; note = 2'-O-methyl modified nucleoside
  modified_base 15: mod_base = OTHER; note = 2'-O-methyl modified nucleoside
  modified_base 16: mod_base = OTHER; note = 2'-O-methyl modified nucleoside
  modified_base 17: mod_base = OTHER; note = 2'-O-methyl modified nucleoside
  modified_base 18: mod_base = OTHER; note = 2'-O-methyl modified nucleoside
  modified_base 19: mod_base = OTHER; note = 2'-O-methyl modified nucleoside with phosphorothioate linkage
  modified_base 20: mod_base = OTHER; note = 2'-O-methyl modified nucleoside with phosphorothioate linkage
  modified_base 21: mod_base = OTHER; note = 2'-O-methyl modified nucleoside
atagttgaattacttcgaatt

SEQ ID NO: 12804 - RNA, 21 nt, synthetic construct
  source 1..21: mol_type = other RNA
  modified_base 1: mod_base = OTHER; note = 2'-O-methyl modified nucleoside with phosphorothioate linkage
  modified_base 2: mod_base = OTHER; note = 2'-O-methyl modified nucleoside with phosphorothioate linkage
  modified_base 3: mod_base = OTHER; note = 2'-O-methyl modified nucleoside
  modified_base 4: mod_base = OTHER; note = 2'-O-methyl modified nucleoside
  modified_base 5: mod_base = OTHER; note = 2'-O-methyl modified nucleoside
  modified_base 6: mod_base = OTHER; note = 2'-O-methyl modified nucleoside
  modified_base 7: mod_base = OTHER; note = 2'-fluoro-modified nucleoside
  modified_base 8: mod_base = OTHER; note = 2'-O-methyl modified nucleoside
  modified_base 9: mod_base = OTHER; note = 2'-fluoro-modified nucleoside
  modified_base 10: mod_base = OTHER; note = 2'-O-methyl modified nucleoside
  modified_base 11: mod_base = OTHER; note = 2'-O-methyl modified nucleoside
  modified_base 12: mod_base = OTHER; note = 2'-O-methyl modified nucleoside
  modified_base 13: mod_base = OTHER; note = 2'-O-methyl modified nucleoside
  modified_base 14: mod_base = OTHER; note = 2'-O-methyl modified nucleoside
  modified_base 15: mod_base = OTHER; note = 2'-O-methyl modified nucleoside
  modified_base 16: mod_base = OTHER; note = 2'-O-methyl modified nucleoside
  modified_base 17: mod_base = OTHER; note = 2'-O-methyl modified nucleoside
  modified_base 18: mod_base = OTHER; note = 2'-O-methyl modified nucleoside
  modified_base 19: mod_base = OTHER; note = 2'-O-methyl modified nucleoside with phosphorothioate linkage
  modified_base 20: mod_base = OTHER; note = 2'-O-methyl modified nucleoside with phosphorothioate linkage
  modified_base 21: mod_base = OTHER; note = 2'-O-methyl modified nucleoside
atagttgaattacttcgaatt

SEQ ID NO: 12805 - RNA, 21 nt, synthetic construct
  source 1..21: mol_type = other RNA
  modified_base 1: mod_base = OTHER; note = 2'-O-methyl modified nucleoside with phosphorothioate linkage
  modified_base 2: mod_base = OTHER; note = 2'-O-methyl modified nucleoside with phosphorothioate linkage
  modified_base 3: mod_base = OTHER; note = 2'-O-methyl modified nucleoside
  modified_base 4: mod_base = OTHER; note = 2'-O-methyl modified nucleoside
  modified_base 5: mod_base = OTHER; note = 2'-O-methyl modified nucleoside
  modified_base 6: mod_base = OTHER; note = 2'-fluoro-modified nucleoside
  modified_base 7: mod_base = OTHER; note = 2'-O-methyl modified nucleoside
  modified_base 8: mod_base = OTHER; note = 2'-O-methyl modified nucleoside
  modified_base 9: mod_base = OTHER; note = 2'-fluoro-modified nucleoside
  modified_base 10: mod_base = OTHER; note = 2'-O-methyl modified nucleoside
  modified_base 11: mod_base = OTHER; note = 2'-O-methyl modified nucleoside
  modified_base 12: mod_base = OTHER; note = 2'-O-methyl modified nucleoside
  modified_base 13: mod_base = OTHER; note = 2'-O-methyl modified nucleoside
  modified_base 14: mod_base = OTHER; note = 2'-O-methyl modified nucleoside
  modified_base 15: mod_base = OTHER; note = 2'-O-methyl modified nucleoside
  modified_base 16: mod_base = OTHER; note = 2'-O-methyl modified nucleoside
  modified_base 17: mod_base = OTHER; note = 2'-O-methyl modified nucleoside
  modified_base 18: mod_base = OTHER; note = 2'-O-methyl modified nucleoside
  modified_base 19: mod_base = OTHER; note = 2'-O-methyl modified nucleoside with phosphorothioate linkage
  modified_base 20: mod_base = OTHER; note = 2'-O-methyl modified nucleoside with phosphorothioate linkage
  modified_base 21: mod_base = OTHER; note = 2'-O-methyl modified nucleoside
ttcgacagcagcaattctatt

SEQ ID NO: 12806 - RNA, 21 nt, synthetic construct
  source 1..21: mol_type = other RNA
  modified_base 1: mod_base = OTHER; note = 2'-O-methyl modified nucleoside with phosphorothioate linkage
  modified_base 2: mod_base = OTHER; note = 2'-O-methyl modified nucleoside with phosphorothioate linkage
  modified_base 3: mod_base = OTHER; note = 2'-O-methyl modified nucleoside
  modified_base 4: mod_base = OTHER; note = 2'-O-methyl modified nucleoside
  modified_base 5: mod_base = OTHER; note = 2'-O-methyl modified nucleoside
  modified_base 6: mod_base = OTHER; note = 2'-O-methyl modified nucleoside
  modified_base 7: mod_base = OTHER; note = 2'-O-methyl modified nucleoside
  modified_base 8: mod_base = OTHER; note = 2'-fluoro-modified nucleoside
  modified_base 9: mod_base = OTHER; note = 2'-fluoro-modified nucleoside
  modified_base 10: mod_base = OTHER; note = 2'-O-methyl modified nucleoside
  modified_base 11: mod_base = OTHER; note = 2'-fluoro-modified nucleoside
  modified_base 12: mod_base = OTHER; note = 2'-O-methyl modified nucleoside
  modified_base 13: mod_base = OTHER; note = 2'-O-methyl modified nucleoside
  modified_base 14: mod_base = OTHER; note = 2'-O-methyl modified nucleoside
  modified_base 15: mod_base = OTHER; note = 2'-O-methyl modified nucleoside
  modified_base 16: mod_base = OTHER; note = 2'-O-methyl modified nucleoside
  modified_base 17: mod_base = OTHER; note = 2'-O-methyl modified nucleoside
  modified_base 18: mod_base = OTHER; note = 2'-O-methyl modified nucleoside
  modified_base 19: mod_base = OTHER; note = 2'-O-methyl modified nucleoside with phosphorothioate linkage
  modified_base 20: mod_base = OTHER; note = 2'-O-methyl modified nucleoside with phosphorothioate linkage
  modified_base 21: mod_base = OTHER; note = 2'-O-methyl modified nucleoside
tggaatctcctatgatcgatt

SEQ ID NO: 12807 - RNA, 21 nt, synthetic construct
  source 1..21: mol_type = other RNA
  modified_base 1: mod_base = OTHER; note = 2'-O-methyl modified nucleoside with phosphorothioate linkage
  modified_base 2: mod_base = OTHER; note = 2'-O-methyl modified nucleoside with phosphorothioate linkage
  modified_base 3: mod_base = OTHER; note = 2'-O-methyl modified nucleoside
  modified_base 4: mod_base = OTHER; note = 2'-O-methyl modified nucleoside
  modified_base 5: mod_base = OTHER; note = 2'-O-methyl modified nucleoside
  modified_base 6: mod_base = OTHER; note = 2'-O-methyl modified nucleoside
  modified_base 7: mod_base = OTHER; note = 2'-O-methyl modified nucleoside
  modified_base 8: mod_base = OTHER; note = 2'-fluoro-modified nucleoside
  modified_base 9: mod_base = OTHER; note = 2'-fluoro-modified nucleoside
  modified_base 10: mod_base = OTHER; note = 2'-fluoro-modified nucleoside
  modified_base 11: mod_base = OTHER; note = 2'-fluoro-modified nucleoside
  modified_base 12: mod_base = OTHER; note = 2'-O-methyl modified nucleoside
  modified_base 13: mod_base = OTHER; note = 2'-O-methyl modified nucleoside
  modified_base 14: mod_base = OTHER; note = 2'-O-methyl modified nucleoside
  modified_base 15: mod_base = OTHER; note = 2'-O-methyl modified nucleoside
  modified_base 16: mod_base = OTHER; note = 2'-O-methyl modified nucleoside
  modified_base 17: mod_base = OTHER; note = 2'-O-methyl modified nucleoside
  modified_base 18: mod_base = OTHER; note = 2'-O-methyl modified nucleoside
  modified_base 19: mod_base = OTHER; note = 2'-O-methyl modified nucleoside with phosphorothioate linkage
  modified_base 20: mod_base = OTHER; note = 2'-O-methyl modified nucleoside with phosphorothioate linkage
  modified_base 21: mod_base = OTHER; note = 2'-O-methyl modified nucleoside
tggaatctcctatgatcgatt

SEQ ID NO: 12808 - RNA, 21 nt, synthetic construct
  source 1..21: mol_type = other RNA
  modified_base 1: mod_base = OTHER; note = 2'-O-methyl modified nucleoside with phosphorothioate linkage
  modified_base 2: mod_base = OTHER; note = 2'-O-methyl modified nucleoside with phosphorothioate linkage
  modified_base 3: mod_base = OTHER; note = 2'-O-methyl modified nucleoside
  modified_base 4: mod_base = OTHER; note = 2'-O-methyl modified nucleoside
  modified_base 5: mod_base = OTHER; note = 2'-O-methyl modified nucleoside
  modified_base 6: mod_base = OTHER; note = 2'-O-methyl modified nucleoside
  modified_base 7: mod_base = OTHER; note = 2'-fluoro-modified nucleoside
  modified_base 8: mod_base = OTHER; note = 2'-O-methyl modified nucleoside
  modified_base 9: mod_base = OTHER; note = 2'-fluoro-modified nucleoside
  modified_base 10: mod_base = OTHER; note = 2'-O-methyl modified nucleoside
  modified_base 11: mod_base = OTHER; note = 2'-fluoro-modified nucleoside
  modified_base 12: mod_base = OTHER; note = 2'-O-methyl modified nucleoside
  modified_base 13: mod_base = OTHER; note = 2'-O-methyl modified nucleoside
  modified_base 14: mod_base = OTHER; note = 2'-O-methyl modified nucleoside
  modified_base 15: mod_base = OTHER; note = 2'-O-methyl modified nucleoside
  modified_base 16: mod_base = OTHER; note = 2'-O-methyl modified nucleoside
  modified_base 17: mod_base = OTHER; note = 2'-O-methyl modified nucleoside
  modified_base 18: mod_base = OTHER; note = 2'-O-methyl modified nucleoside
  modified_base 19: mod_base = OTHER; note = 2'-O-methyl modified nucleoside with phosphorothioate linkage
  modified_base 20: mod_base = OTHER; note = 2'-O-methyl modified nucleoside with phosphorothioate linkage
  modified_base 21: mod_base = OTHER; note = 2'-O-methyl modified nucleoside
tggaatctcctatgatcgatt

SEQ ID NO: 12809 - RNA, 21 nt, synthetic construct
  source 1..21: mol_type = other RNA
  modified_base 1: mod_base = OTHER; note = 2'-O-methyl modified nucleoside with phosphorothioate linkage
  modified_base 2: mod_base = OTHER; note = 2'-O-methyl modified nucleoside with phosphorothioate linkage
  modified_base 3: mod_base = OTHER; note = 2'-O-methyl modified nucleoside
  modified_base 4: mod_base = OTHER; note = 2'-O-methyl modified nucleoside
  modified_base 5: mod_base = OTHER; note = 2'-O-methyl modified nucleoside
  modified_base 6: mod_base = OTHER; note = 2'-O-methyl modified nucleoside
  modified_base 7: mod_base = OTHER; note = 2'-fluoro-modified nucleoside
  modified_base 8: mod_base = OTHER; note = 2'-O-methyl modified nucleoside
  modified_base 9: mod_base = OTHER; note = 2'-fluoro-modified nucleoside
  modified_base 10: mod_base = OTHER; note = 2'-fluoro-modified nucleoside
  modified_base 11: mod_base = OTHER; note = 2'-O-methyl modified nucleoside
  modified_base 12: mod_base = OTHER; note = 2'-O-methyl modified nucleoside
  modified_base 13: mod_base = OTHER; note = 2'-O-methyl modified nucleoside
  modified_base 14: mod_base = OTHER; note = 2'-O-methyl modified nucleoside
  modified_base 15: mod_base = OTHER; note = 2'-O-methyl modified nucleoside
  modified_base 16: mod_base = OTHER; note = 2'-O-methyl modified nucleoside
  modified_base 17: mod_base = OTHER; note = 2'-O-methyl modified nucleoside
  modified_base 18: mod_base = OTHER; note = 2'-O-methyl modified nucleoside
  modified_base 19: mod_base = OTHER; note = 2'-O-methyl modified nucleoside with phosphorothioate linkage
  modified_base 20: mod_base = OTHER; note = 2'-O-methyl modified nucleoside with phosphorothioate linkage
  modified_base 21: mod_base = OTHER; note = 2'-O-methyl modified nucleoside
tggaatctcctatgatcgatt

SEQ ID NO: 12810 - RNA, 21 nt, synthetic construct
  source 1..21: mol_type = other RNA
  modified_base 1: mod_base = OTHER; note = 2'-O-methyl modified nucleoside with phosphorothioate linkage
  modified_base 2: mod_base = OTHER; note = 2'-O-methyl modified nucleoside with phosphorothioate linkage
  modified_base 3: mod_base = OTHER; note = 2'-O-methyl modified nucleoside
  modified_base 4: mod_base = OTHER; note = 2'-O-methyl modified nucleoside
  modified_base 5: mod_base = OTHER; note = 2'-O-methyl modified nucleoside
  modified_base 6: mod_base = OTHER; note = 2'-O-methyl modified nucleoside
  modified_base 7: mod_base = OTHER; note = 2'-fluoro-modified nucleoside
  modified_base 8: mod_base = OTHER; note = 2'-fluoro-modified nucleoside
  modified_base 9: mod_base = OTHER; note = 2'-fluoro-modified nucleoside
  modified_base 10: mod_base = OTHER; note = 2'-fluoro-modified nucleoside
  modified_base 11: mod_base = OTHER; note = 2'-O-methyl modified nucleoside
  modified_base 12: mod_base = OTHER; note = 2'-O-methyl modified nucleoside
  modified_base 13: mod_base = OTHER; note = 2'-O-methyl modified nucleoside
  modified_base 14: mod_base = OTHER; note = 2'-O-methyl modified nucleoside
  modified_base 15: mod_base = OTHER; note = 2'-O-methyl modified nucleoside
  modified_base 16: mod_base = OTHER; note = 2'-O-methyl modified nucleoside
  modified_base 17: mod_base = OTHER; note = 2'-O-methyl modified nucleoside
  modified_base 18: mod_base = OTHER; note = 2'-O-methyl modified nucleoside
  modified_base 19: mod_base = OTHER; note = 2'-O-methyl modified nucleoside with phosphorothioate linkage
  modified_base 20: mod_base = OTHER; note = 2'-O-methyl modified nucleoside with phosphorothioate linkage
  modified_base 21: mod_base = OTHER; note = 2'-O-methyl modified nucleoside
tggaatctcctatgatcgatt

SEQ ID NO: 12811 - RNA, 21 nt, synthetic construct
  source 1..21: mol_type = other RNA
  modified_base 1: mod_base = OTHER; note = 2'-O-methyl modified nucleoside with phosphorothioate linkage
  modified_base 2: mod_base = OTHER; note = 2'-O-methyl modified nucleoside with phosphorothioate linkage
  modified_base 3: mod_base = OTHER; note = 2'-O-methyl modified nucleoside
  modified_base 4: mod_base = OTHER; note = 2'-O-methyl modified nucleoside
  modified_base 5: mod_base = OTHER; note = 2'-O-methyl modified nucleoside
  modified_base 6: mod_base = OTHER; note = 2'-O-methyl modified nucleoside
  modified_base 7: mod_base = OTHER; note = 2'-fluoro-modified nucleoside
  modified_base 8: mod_base = OTHER; note = 2'-fluoro-modified nucleoside
  modified_base 9: mod_base = OTHER; note = 2'-fluoro-modified nucleoside
  modified_base 10: mod_base = OTHER; note = 2'-fluoro-modified nucleoside
  modified_base 11: mod_base = OTHER; note = 2'-fluoro-modified nucleoside
  modified_base 12: mod_base = OTHER; note = 2'-O-methyl modified nucleoside
  modified_base 13: mod_base = OTHER; note = 2'-O-methyl modified nucleoside
  modified_base 14: mod_base = OTHER; note = 2'-O-methyl modified nucleoside
  modified_base 15: mod_base = OTHER; note = 2'-O-methyl modified nucleoside
  modified_base 16: mod_base = OTHER; note = 2'-O-methyl modified nucleoside
  modified_base 17: mod_base = OTHER; note = 2'-O-methyl modified nucleoside
  modified_base 18: mod_base = OTHER; note = 2'-O-methyl modified nucleoside
  modified_base 19: mod_base = OTHER; note = 2'-O-methyl modified nucleoside with phosphorothioate linkage
  modified_base 20: mod_base = OTHER; note = 2'-O-methyl modified nucleoside with phosphorothioate linkage
  modified_base 21: mod_base = OTHER; note = 2'-O-methyl modified nucleoside
tggaatctcctatgatcgatt

SEQ ID NO: 12812 - RNA, 21 nt, synthetic construct
  source 1..21: mol_type = other RNA
  modified_base 1: mod_base = OTHER; note = 2'-O-methyl modified nucleoside with phosphorothioate linkage
  modified_base 2: mod_base = OTHER; note = 2'-O-methyl modified nucleoside with phosphorothioate linkage
  modified_base 3: mod_base = OTHER; note = 2'-O-methyl modified nucleoside
  modified_base 4: mod_base = OTHER; note = 2'-O-methyl modified nucleoside
  modified_base 5: mod_base = OTHER; note = 2'-O-methyl modified nucleoside
  modified_base 6: mod_base = OTHER; note = 2'-fluoro-modified nucleoside
  modified_base 7: mod_base = OTHER; note = 2'-O-methyl modified nucleoside
  modified_base 8: mod_base = OTHER; note = 2'-O-methyl modified nucleoside
  modified_base 9: mod_base = OTHER; note = 2'-fluoro-modified nucleoside
  modified_base 10: mod_base = OTHER; note = 2'-O-methyl modified nucleoside
  modified_base 11: mod_base = OTHER; note = 2'-fluoro-modified nucleoside
  modified_base 12: mod_base = OTHER; note = 2'-O-methyl modified nucleoside
  modified_base 13: mod_base = OTHER; note = 2'-O-methyl modified nucleoside
  modified_base 14: mod_base = OTHER; note = 2'-O-methyl modified nucleoside
  modified_base 15: mod_base = OTHER; note = 2'-O-methyl modified nucleoside
  modified_base 16: mod_base = OTHER; note = 2'-O-methyl modified nucleoside
  modified_base 17: mod_base = OTHER; note = 2'-O-methyl modified nucleoside
  modified_base 18: mod_base = OTHER; note = 2'-O-methyl modified nucleoside
  modified_base 19: mod_base = OTHER; note = 2'-O-methyl modified nucleoside with phosphorothioate linkage
  modified_base 20: mod_base = OTHER; note = 2'-O-methyl modified nucleoside with phosphorothioate linkage
  modified_base 21: mod_base = OTHER; note = 2'-O-methyl modified nucleoside
tggaatctcctatgatcgatt

SEQ ID NO: 12813 - RNA, 21 nt, synthetic construct
  source 1..21: mol_type = other RNA
  modified_base 1: mod_base = OTHER; note = 2'-O-methyl modified nucleoside with phosphorothioate linkage
  modified_base 2: mod_base = OTHER; note = 2'-O-methyl modified nucleoside with phosphorothioate linkage
  modified_base 3: mod_base = OTHER; note = 2'-O-methyl modified nucleoside
  modified_base 4: mod_base = OTHER; note = 2'-O-methyl modified nucleoside
  modified_base 5: mod_base = OTHER; note = 2'-O-methyl modified nucleoside
  modified_base 6: mod_base = OTHER; note = 2'-fluoro-modified nucleoside
  modified_base 7: mod_base = OTHER; note = 2'-O-methyl modified nucleoside
  modified_base 8: mod_base = OTHER; note = 2'-O-methyl modified nucleoside
  modified_base 9: mod_base = OTHER; note = 2'-fluoro-modified nucleoside
  modified_base 10: mod_base = OTHER; note = 2'-fluoro-modified nucleoside
  modified_base 11: mod_base = OTHER; note = 2'-O-methyl modified nucleoside
  modified_base 12: mod_base = OTHER; note = 2'-O-methyl modified nucleoside
  modified_base 13: mod_base = OTHER; note = 2'-O-methyl modified nucleoside
  modified_base 14: mod_base = OTHER; note = 2'-O-methyl modified nucleoside
  modified_base 15: mod_base = OTHER; note = 2'-O-methyl modified nucleoside
  modified_base 16: mod_base = OTHER; note = 2'-O-methyl modified nucleoside
  modified_base 17: mod_base = OTHER; note = 2'-O-methyl modified nucleoside
  modified_base 18: mod_base = OTHER; note = 2'-O-methyl modified nucleoside
  modified_base 19: mod_base = OTHER; note = 2'-O-methyl modified nucleoside with phosphorothioate linkage
  modified_base 20: mod_base = OTHER; note = 2'-O-methyl modified nucleoside with phosphorothioate linkage
  modified_base 21: mod_base = OTHER; note = 2'-O-methyl modified nucleoside
tggaatctcctatgatcgatt

SEQ ID NO: 12814 - RNA, 21 nt, synthetic construct
  source 1..21: mol_type = other RNA
  modified_base 1: mod_base = OTHER; note = 2'-O-methyl modified nucleoside with phosphorothioate linkage
  modified_base 2: mod_base = OTHER; note = 2'-O-methyl modified nucleoside with phosphorothioate linkage
  modified_base 3: mod_base = OTHER; note = 2'-O-methyl modified nucleoside
  modified_base 4: mod_base = OTHER; note = 2'-O-methyl modified nucleoside
  modified_base 5: mod_base = OTHER; note = 2'-O-methyl modified nucleoside
  modified_base 6: mod_base = OTHER; note = 2'-fluoro-modified nucleoside
  modified_base 7: mod_base = OTHER; note = 2'-O-methyl modified nucleoside
  modified_base 8: mod_base = OTHER; note = 2'-fluoro-modified nucleoside
  modified_base 9: mod_base = OTHER; note = 2'-fluoro-modified nucleoside
  modified_base 10: mod_base = OTHER; note = 2'-O-methyl modified nucleoside
  modified_base 11: mod_base = OTHER; note = 2'-O-methyl modified nucleoside
  modified_base 12: mod_base = OTHER; note = 2'-O-methyl modified nucleoside
  modified_base 13: mod_base = OTHER; note = 2'-O-methyl modified nucleoside
  modified_base 14: mod_base = OTHER; note = 2'-O-methyl modified nucleoside
  modified_base 15: mod_base = OTHER; note = 2'-O-methyl modified nucleoside
  modified_base 16: mod_base = OTHER; note = 2'-O-methyl modified nucleoside
  modified_base 17: mod_base = OTHER; note = 2'-O-methyl modified nucleoside
  modified_base 18: mod_base = OTHER; note = 2'-O-methyl modified nucleoside
  modified_base 19: mod_base = OTHER; note = 2'-O-methyl modified nucleoside with phosphorothioate linkage
  modified_base 20: mod_base = OTHER; note = 2'-O-methyl modified nucleoside with phosphorothioate linkage
  modified_base 21: mod_base = OTHER; note = 2'-O-methyl modified nucleoside
tggaatctcctatgatcgatt

SEQ ID NO: 12815 - RNA, 21 nt, synthetic construct
  source 1..21: mol_type = other RNA
  modified_base 1: mod_base = OTHER; note = 2'-O-methyl modified nucleoside with phosphorothioate linkage
  modified_base 2: mod_base = OTHER; note = 2'-O-methyl modified nucleoside with phosphorothioate linkage
  modified_base 3: mod_base = OTHER; note = 2'-O-methyl modified nucleoside
  modified_base 4: mod_base = OTHER; note = 2'-O-methyl modified nucleoside
  modified_base 5: mod_base = OTHER; note = 2'-O-methyl modified nucleoside
  modified_base 6: mod_base = OTHER; note = 2'-fluoro-modified nucleoside
  modified_base 7: mod_base = OTHER; note = 2'-O-methyl modified nucleoside
  modified_base 8: mod_base = OTHER; note = 2'-fluoro-modified nucleoside
  modified_base 9: mod_base = OTHER; note = 2'-fluoro-modified nucleoside
  modified_base 10: mod_base = OTHER; note = 2'-O-methyl modified nucleoside
  modified_base 11: mod_base = OTHER; note = 2'-fluoro-modified nucleoside
  modified_base 12: mod_base = OTHER; note = 2'-O-methyl modified nucleoside
  modified_base 13: mod_base = OTHER; note = 2'-O-methyl modified nucleoside
  modified_base 14: mod_base = OTHER; note = 2'-O-methyl modified nucleoside
  modified_base 15: mod_base = OTHER; note = 2'-O-methyl modified nucleoside
  modified_base 16: mod_base = OTHER; note = 2'-O-methyl modified nucleoside
  modified_base 17: mod_base = OTHER; note = 2'-O-methyl modified nucleoside
  modified_base 18: mod_base = OTHER; note = 2'-O-methyl modified nucleoside
  modified_base 19: mod_base = OTHER; note = 2'-O-methyl modified nucleoside with phosphorothioate linkage
  modified_base 20: mod_base = OTHER; note = 2'-O-methyl modified nucleoside with phosphorothioate linkage
  modified_base 21: mod_base = OTHER; note = 2'-O-methyl modified nucleoside
tggaatctcctatgatcgatt

SEQ ID NO: 12816 - RNA, 21 nt, synthetic construct
  source 1..21: mol_type = other RNA
  modified_base 1: mod_base = OTHER; note = 2'-O-methyl modified nucleoside with phosphorothioate linkage
  modified_base 2: mod_base = OTHER; note = 2'-O-methyl modified nucleoside with phosphorothioate linkage
  modified_base 3: mod_base = OTHER; note = 2'-O-methyl modified nucleoside
  modified_base 4: mod_base = OTHER; note = 2'-O-methyl modified nucleoside
  modified_base 5: mod_base = OTHER; note = 2'-O-methyl modified nucleoside
  modified_base 6: mod_base = OTHER; note = 2'-fluoro-modified nucleoside
  modified_base 7: mod_base = OTHER; note = 2'-O-methyl modified nucleoside
  modified_base 8: mod_base = OTHER; note = 2'-fluoro-modified nucleoside
  modified_base 9: mod_base = OTHER; note = 2'-fluoro-modified nucleoside
  modified_base 10: mod_base = OTHER; note = 2'-fluoro-modified nucleoside
  modified_base 11: mod_base = OTHER; note = 2'-fluoro-modified nucleoside
  modified_base 12: mod_base = OTHER; note = 2'-O-methyl modified nucleoside
  modified_base 13: mod_base = OTHER; note = 2'-O-methyl modified nucleoside
  modified_base 14: mod_base = OTHER; note = 2'-O-methyl modified nucleoside
  modified_base 15: mod_base = OTHER; note = 2'-O-methyl modified nucleoside
  modified_base 16: mod_base = OTHER; note = 2'-O-methyl modified nucleoside
  modified_base 17: mod_base = OTHER; note = 2'-O-methyl modified nucleoside
  modified_base 18: mod_base = OTHER; note = 2'-O-methyl modified nucleoside
  modified_base 19: mod_base = OTHER; note = 2'-O-methyl modified nucleoside with phosphorothioate linkage
  modified_base 20: mod_base = OTHER; note = 2'-O-methyl modified nucleoside with phosphorothioate linkage
  modified_base 21: mod_base = OTHER; note = 2'-O-methyl modified nucleoside
tggaatctcctatgatcgatt

SEQ ID NO: 12817 - RNA, 21 nt, synthetic construct
  source 1..21: mol_type = other RNA
  modified_base 1: mod_base = OTHER; note = 2'-O-methyl modified nucleoside with phosphorothioate linkage
  modified_base 2: mod_base = OTHER; note = 2'-O-methyl modified nucleoside with phosphorothioate linkage
  modified_base 3: mod_base = OTHER; note = 2'-O-methyl modified nucleoside
  modified_base 4: mod_base = OTHER; note = 2'-O-methyl modified nucleoside
  modified_base 5: mod_base = OTHER; note = 2'-O-methyl modified nucleoside
  modified_base 6: mod_base = OTHER; note = 2'-fluoro-modified nucleoside
  modified_base 7: mod_base = OTHER; note = 2'-fluoro-modified nucleoside
  modified_base 8: mod_base = OTHER; note = 2'-O-methyl modified nucleoside
  modified_base 9: mod_base = OTHER; note = 2'-fluoro-modified nucleoside
  modified_base 10: mod_base = OTHER; note = 2'-O-methyl modified nucleoside
  modified_base 11: mod_base = OTHER; note = 2'-O-methyl modified nucleoside
  modified_base 12: mod_base = OTHER; note = 2'-O-methyl modified nucleoside
  modified_base 13: mod_base = OTHER; note = 2'-O-methyl modified nucleoside
  modified_base 14: mod_base = OTHER; note = 2'-O-methyl modified nucleoside
  modified_base 15: mod_base = OTHER; note = 2'-O-methyl modified nucleoside
  modified_base 16: mod_base = OTHER; note = 2'-O-methyl modified nucleoside
  modified_base 17: mod_base = OTHER; note = 2'-O-methyl modified nucleoside
  modified_base 18: mod_base = OTHER; note = 2'-O-methyl modified nucleoside
  modified_base 19: mod_base = OTHER; note = 2'-O-methyl modified nucleoside with phosphorothioate linkage
  modified_base 20: mod_base = OTHER; note = 2'-O-methyl modified nucleoside with phosphorothioate linkage
  modified_base 21: mod_base = OTHER; note = 2'-O-methyl modified nucleoside
tggaatctcctatgatcgatt

SEQ ID NO: 12818 - RNA, 21 nt, synthetic construct
  source 1..21: mol_type = other RNA
  modified_base 1: mod_base = OTHER; note = 2'-O-methyl modified nucleoside with phosphorothioate linkage
  modified_base 2: mod_base = OTHER; note = 2'-O-methyl modified nucleoside with phosphorothioate linkage
  modified_base 3: mod_base = OTHER; note = 2'-O-methyl modified nucleoside
  modified_base 4: mod_base = OTHER; note = 2'-O-methyl modified nucleoside
  modified_base 5: mod_base = OTHER; note = 2'-O-methyl modified nucleoside
  modified_base 6: mod_base = OTHER; note = 2'-fluoro-modified nucleoside
  modified_base 7: mod_base = OTHER; note = 2'-fluoro-modified nucleoside
  modified_base 8: mod_base = OTHER; note = 2'-O-methyl modified nucleoside
  modified_base 9: mod_base = OTHER; note = 2'-fluoro-modified nucleoside
  modified_base 10: mod_base = OTHER; note = 2'-O-methyl modified nucleoside
  modified_base 11: mod_base = OTHER; note = 2'-fluoro-modified nucleoside
  modified_base 12: mod_base = OTHER; note = 2'-O-methyl modified nucleoside
  modified_base 13: mod_base = OTHER; note = 2'-O-methyl modified nucleoside
  modified_base 14: mod_base = OTHER; note = 2'-O-methyl modified nucleoside
  modified_base 15: mod_base = OTHER; note = 2'-O-methyl modified nucleoside
  modified_base 16: mod_base = OTHER; note = 2'-O-methyl modified nucleoside
  modified_base 17: mod_base = OTHER; note = 2'-O-methyl modified nucleoside
  modified_base 18: mod_base = OTHER; note = 2'-O-methyl modified nucleoside
  modified_base 19: mod_base = OTHER; note = 2'-O-methyl modified nucleoside with phosphorothioate linkage
  modified_base 20: mod_base = OTHER; note = 2'-O-methyl modified nucleoside with phosphorothioate linkage
  modified_base 21: mod_base = OTHER; note = 2'-O-methyl modified nucleoside
tggaatctcctatgatcgatt

SEQ ID NO: 12819 - RNA, 21 nt, synthetic construct
  source 1..21: mol_type = other RNA
  modified_base 1: mod_base = OTHER; note = 2'-O-methyl modified nucleoside with phosphorothioate linkage
  modified_base 2: mod_base = OTHER; note = 2'-O-methyl modified nucleoside with phosphorothioate linkage
  modified_base 3: mod_base = OTHER; note = 2'-O-methyl modified nucleoside
  modified_base 4: mod_base = OTHER; note = 2'-O-methyl modified nucleoside
  modified_base 5: mod_base = OTHER; note = 2'-O-methyl modified nucleoside
  modified_base 6: mod_base = OTHER; note = 2'-fluoro-modified nucleoside
  modified_base 7: mod_base = OTHER; note = 2'-fluoro-modified nucleoside
  modified_base 8: mod_base = OTHER; note = 2'-fluoro-modified nucleoside
  modified_base 9: mod_base = OTHER; note = 2'-fluoro-modified nucleoside
  modified_base 10: mod_base = OTHER; note = 2'-O-methyl modified nucleoside
  modified_base 11: mod_base = OTHER; note = 2'-O-methyl modified nucleoside
  modified_base 12: mod_base = OTHER; note = 2'-O-methyl modified nucleoside
  modified_base 13: mod_base = OTHER; note = 2'-O-methyl modified nucleoside
  modified_base 14: mod_base = OTHER; note = 2'-O-methyl modified nucleoside
  modified_base 15: mod_base = OTHER; note = 2'-O-methyl modified nucleoside
  modified_base 16: mod_base = OTHER; note = 2'-O-methyl modified nucleoside
  modified_base 17: mod_base = OTHER; note = 2'-O-methyl modified nucleoside
  modified_base 18: mod_base = OTHER; note = 2'-O-methyl modified nucleoside
  modified_base 19: mod_base = OTHER; note = 2'-O-methyl modified nucleoside with phosphorothioate linkage
  modified_base 20: mod_base = OTHER; note = 2'-O-methyl modified nucleoside with phosphorothioate linkage
  modified_base 21: mod_base = OTHER; note = 2'-O-methyl modified nucleoside
tggaatctcctatgatcgatt

SEQ ID NO: 12820 - RNA, 21 nt, synthetic construct
  source 1..21: mol_type = other RNA
  modified_base 1: mod_base = OTHER; note = 2'-O-methyl modified nucleoside with phosphorothioate linkage
  modified_base 2: mod_base = OTHER; note = 2'-O-methyl modified nucleoside with phosphorothioate linkage
  modified_base 3: mod_base = OTHER; note = 2'-O-methyl modified nucleoside
  modified_base 4: mod_base = OTHER; note = 2'-O-methyl modified nucleoside
  modified_base 5: mod_base = OTHER; note = 2'-O-methyl modified nucleoside
  modified_base 6: mod_base = OTHER; note = 2'-fluoro-modified nucleoside
  modified_base 7: mod_base = OTHER; note = 2'-fluoro-modified nucleoside
  modified_base 8: mod_base = OTHER; note = 2'-fluoro-modified nucleoside
  modified_base 9: mod_base = OTHER; note = 2'-fluoro-modified nucleoside
  modified_base 10: mod_base = OTHER; note = 2'-O-methyl modified nucleoside
  modified_base 11: mod_base = OTHER; note = 2'-fluoro-modified nucleoside
  modified_base 12: mod_base = OTHER; note = 2'-O-methyl modified nucleoside
  modified_base 13: mod_base = OTHER; note = 2'-O-methyl modified nucleoside
  modified_base 14: mod_base = OTHER; note = 2'-O-methyl modified nucleoside
  modified_base 15: mod_base = OTHER; note = 2'-O-methyl modified nucleoside
  modified_base 16: mod_base = OTHER; note = 2'-O-methyl modified nucleoside
  modified_base 17: mod_base = OTHER; note = 2'-O-methyl modified nucleoside
  modified_base 18: mod_base = OTHER; note = 2'-O-methyl modified nucleoside
  modified_base 19: mod_base = OTHER; note = 2'-O-methyl modified nucleoside with phosphorothioate linkage
  modified_base 20: mod_base = OTHER; note = 2'-O-methyl modified nucleoside with phosphorothioate linkage
  modified_base 21: mod_base = OTHER; note = 2'-O-methyl modified nucleoside
tggaatctcctatgatcgatt

SEQ ID NO: 12821 - RNA, 21 nt, synthetic construct
  source 1..21: mol_type = other RNA
  modified_base 1: mod_base = OTHER; note = 2'-O-methyl modified nucleoside with phosphorothioate linkage
  modified_base 2: mod_base = OTHER; note = 2'-O-methyl modified nucleoside with phosphorothioate linkage
  modified_base 3: mod_base = OTHER; note = 2'-O-methyl modified nucleoside
  modified_base 4: mod_base = OTHER; note = 2'-O-methyl modified nucleoside
  modified_base 5: mod_base = OTHER; note = 2'-O-methyl modified nucleoside
  modified_base 6: mod_base = OTHER; note = 2'-fluoro-modified nucleoside
  modified_base 7: mod_base = OTHER; note = 2'-fluoro-modified nucleoside
  modified_base 8: mod_base = OTHER; note = 2'-fluoro-modified nucleoside
  modified_base 9: mod_base = OTHER; note = 2'-fluoro-modified nucleoside
  modified_base 10: mod_base = OTHER; note = 2'-fluoro-modified nucleoside
  modified_base 11: mod_base = OTHER; note = 2'-O-methyl modified nucleoside
  modified_base 12: mod_base = OTHER; note = 2'-O-methyl modified nucleoside
  modified_base 13: mod_base = OTHER; note = 2'-O-methyl modified nucleoside
  modified_base 14: mod_base = OTHER; note = 2'-O-methyl modified nucleoside
  modified_base 15: mod_base = OTHER; note = 2'-O-methyl modified nucleoside
  modified_base 16: mod_base = OTHER; note = 2'-O-methyl modified nucleoside
  modified_base 17: mod_base = OTHER; note = 2'-O-methyl modified nucleoside
  modified_base 18: mod_base = OTHER; note = 2'-O-methyl modified nucleoside
  modified_base 19: mod_base = OTHER; note = 2'-O-methyl modified nucleoside with phosphorothioate linkage
  modified_base 20: mod_base = OTHER; note = 2'-O-methyl modified nucleoside with phosphorothioate linkage
  modified_base 21: mod_base = OTHER; note = 2'-O-methyl modified nucleoside
tggaatctcctatgatcgatt

SEQ ID NO: 12822 - RNA, 21 nt, synthetic construct
  source 1..21: mol_type = other RNA
  modified_base 1: mod_base = OTHER; note = 2'-O-methyl modified nucleoside with phosphorothioate linkage
  modified_base 2: mod_base = OTHER; note = 2'-O-methyl modified nucleoside with phosphorothioate linkage
  modified_base 3: mod_base = OTHER; note = 2'-O-methyl modified nucleoside
  modified_base 4: mod_base = OTHER; note = 2'-O-methyl modified nucleoside
  modified_base 5: mod_base = OTHER; note = 2'-O-methyl modified nucleoside
  modified_base 6: mod_base = OTHER; note = 2'-O-methyl modified nucleoside
  modified_base 7: mod_base = OTHER; note = 2'-O-methyl modified nucleoside
  modified_base 8: mod_base = OTHER; note = 2'-fluoro-modified nucleoside
  modified_base 9: mod_base = OTHER; note = 2'-fluoro-modified nucleoside
  modified_base 10: mod_base = OTHER; note = 2'-O-methyl modified nucleoside
  modified_base 11: mod_base = OTHER; note = 2'-fluoro-modified nucleoside
  modified_base 12: mod_base = OTHER; note = 2'-O-methyl modified nucleoside
  modified_base 13: mod_base = OTHER; note = 2'-O-methyl modified nucleoside
  modified_base 14: mod_base = OTHER; note = 2'-O-methyl modified nucleoside
  modified_base 15: mod_base = OTHER; note = 2'-O-methyl modified nucleoside
  modified_base 16: mod_base = OTHER; note = 2'-O-methyl modified nucleoside
  modified_base 17: mod_base = OTHER; note = 2'-O-methyl modified nucleoside
  modified_base 18: mod_base = OTHER; note = 2'-O-methyl modified nucleoside
  modified_base 19: mod_base = OTHER; note = 2'-O-methyl modified nucleoside with phosphorothioate linkage
  modified_base 20: mod_base = OTHER; note = 2'-O-methyl modified nucleoside with phosphorothioate linkage
  modified_base 21: mod_base = OTHER; note = 2'-O-methyl modified nucleoside
tgttattagaatgttacgatt

SEQ ID NO: 12823 - RNA, 21 nt, synthetic construct
  source 1..21: mol_type = other RNA
  modified_base 1: mod_base = OTHER; note = 2'-O-methyl modified nucleoside with phosphorothioate linkage
  modified_base 2: mod_base = OTHER; note = 2'-O-methyl modified nucleoside with phosphorothioate linkage
  modified_base 3: mod_base = OTHER; note = 2'-O-methyl modified nucleoside
  modified_base 4: mod_base = OTHER; note = 2'-O-methyl modified nucleoside
  modified_base 5: mod_base = OTHER; note = 2'-O-methyl modified nucleoside
  modified_base 6: mod_base = OTHER; note = 2'-O-methyl modified nucleoside
  modified_base 7: mod_base = OTHER; note = 2'-O-methyl modified nucleoside
  modified_base 8: mod_base = OTHER; note = 2'-fluoro-modified nucleoside
  modified_base 9: mod_base = OTHER; note = 2'-fluoro-modified nucleoside
  modified_base 10: mod_base = OTHER; note = 2'-fluoro-modified nucleoside
  modified_base 11: mod_base = OTHER; note = 2'-fluoro-modified nucleoside
  modified_base 12: mod_base = OTHER; note = 2'-O-methyl modified nucleoside
  modified_base 13: mod_base = OTHER; note = 2'-O-methyl modified nucleoside
  modified_base 14: mod_base = OTHER; note = 2'-O-methyl modified nucleoside
  modified_base 15: mod_base = OTHER; note = 2'-O-methyl modified nucleoside
  modified_base 16: mod_base = OTHER; note = 2'-O-methyl modified nucleoside
  modified_base 17: mod_base = OTHER; note = 2'-O-methyl modified nucleoside
  modified_base 18: mod_base = OTHER; note = 2'-O-methyl modified nucleoside
  modified_base 19: mod_base = OTHER; note = 2'-O-methyl modified nucleoside with phosphorothioate linkage
  modified_base 20: mod_base = OTHER; note = 2'-O-methyl modified nucleoside with phosphorothioate linkage
  modified_base 21: mod_base = OTHER; note = 2'-O-methyl modified nucleoside
tgttattagaatgttacgatt

SEQ ID NO: 12824 - RNA, 21 nt, synthetic construct
  source 1..21: mol_type = other RNA
  modified_base 1: mod_base = OTHER; note = 2'-O-methyl modified nucleoside with phosphorothioate linkage
  modified_base 2: mod_base = OTHER; note = 2'-O-methyl modified nucleoside with phosphorothioate linkage
  modified_base 3: mod_base = OTHER; note = 2'-O-methyl modified nucleoside
  modified_base 4: mod_base = OTHER; note = 2'-O-methyl modified nucleoside
  modified_base 5: mod_base = OTHER; note = 2'-fluoro-modified nucleoside
  modified_base 6: mod_base = OTHER; note = 2'-O-methyl modified nucleoside
  modified_base 7: mod_base = OTHER; note = 2'-O-methyl modified nucleoside
  modified_base 8: mod_base = OTHER; note = 2'-O-methyl modified nucleoside
  modified_base 9: mod_base = OTHER; note = 2'-fluoro-modified nucleoside
  modified_base 10: mod_base = OTHER; note = 2'-O-methyl modified nucleoside
  modified_base 11: mod_base = OTHER; note = 2'-fluoro-modified nucleoside
  modified_base 12: mod_base = OTHER; note = 2'-O-methyl modified nucleoside
  modified_base 13: mod_base = OTHER; note = 2'-O-methyl modified nucleoside
  modified_base 14: mod_base = OTHER; note = 2'-O-methyl modified nucleoside
  modified_base 15: mod_base = OTHER; note = 2'-O-methyl modified nucleoside
  modified_base 16: mod_base = OTHER; note = 2'-O-methyl modified nucleoside
  modified_base 17: mod_base = OTHER; note = 2'-O-methyl modified nucleoside
  modified_base 18: mod_base = OTHER; note = 2'-O-methyl modified nucleoside
  modified_base 19: mod_base = OTHER; note = 2'-O-methyl modified nucleoside with phosphorothioate linkage
  modified_base 20: mod_base = OTHER; note = 2'-O-methyl modified nucleoside with phosphorothioate linkage
  modified_base 21: mod_base = OTHER; note = 2'-O-methyl modified nucleoside
tgttattagaatgttacgatt

SEQ ID NO: 12825 - RNA, 21 nt, synthetic construct
  source 1..21: mol_type = other RNA
  modified_base 1: mod_base = OTHER; note = 2'-O-methyl modified nucleoside with phosphorothioate linkage
  modified_base 2: mod_base = OTHER; note = 2'-O-methyl modified nucleoside with phosphorothioate linkage
  modified_base 3: mod_base = OTHER; note = 2'-O-methyl modified nucleoside
  modified_base 4: mod_base = OTHER; note = 2'-O-methyl modified nucleoside
  modified_base 5: mod_base = OTHER; note = 2'-fluoro-modified nucleoside
  modified_base 6: mod_base = OTHER; note = 2'-O-methyl modified nucleoside
  modified_base 7: mod_base = OTHER; note = 2'-O-methyl modified nucleoside
  modified_base 8: mod_base = OTHER; note = 2'-O-methyl modified nucleoside
  modified_base 9: mod_base = OTHER; note = 2'-fluoro-modified nucleoside
  modified_base 10: mod_base = OTHER; note = 2'-fluoro-modified nucleoside
  modified_base 11: mod_base = OTHER; note = 2'-O-methyl modified nucleoside
  modified_base 12: mod_base = OTHER; note = 2'-O-methyl modified nucleoside
  modified_base 13: mod_base = OTHER; note = 2'-O-methyl modified nucleoside
  modified_base 14: mod_base = OTHER; note = 2'-O-methyl modified nucleoside
  modified_base 15: mod_base = OTHER; note = 2'-O-methyl modified nucleoside
  modified_base 16: mod_base = OTHER; note = 2'-O-methyl modified nucleoside
  modified_base 17: mod_base = OTHER; note = 2'-O-methyl modified nucleoside
  modified_base 18: mod_base = OTHER; note = 2'-O-methyl modified nucleoside
  modified_base 19: mod_base = OTHER; note = 2'-O-methyl modified nucleoside with phosphorothioate linkage
  modified_base 20: mod_base = OTHER; note = 2'-O-methyl modified nucleoside with phosphorothioate linkage
  modified_base 21: mod_base = OTHER; note = 2'-O-methyl modified nucleoside
tgttattagaatgttacgatt

SEQ ID NO: 12826 - RNA, 21 nt, synthetic construct
  source 1..21: mol_type = other RNA
  modified_base 1: mod_base = OTHER; note = 2'-O-methyl modified nucleoside with phosphorothioate linkage
  modified_base 2: mod_base = OTHER; note = 2'-O-methyl modified nucleoside with phosphorothioate linkage
  modified_base 3: mod_base = OTHER; note = 2'-O-methyl modified nucleoside
  modified_base 4: mod_base = OTHER; note = 2'-O-methyl modified nucleoside
  modified_base 5: mod_base = OTHER; note = 2'-fluoro-modified nucleoside
  modified_base 6: mod_base = OTHER; note = 2'-O-methyl modified nucleoside
  modified_base 7: mod_base = OTHER; note = 2'-O-methyl modified nucleoside
  modified_base 8: mod_base = OTHER; note = 2'-fluoro-modified nucleoside
  modified_base 9: mod_base = OTHER; note = 2'-fluoro-modified nucleoside
  modified_base 10: mod_base = OTHER; note = 2'-O-methyl modified nucleoside
  modified_base 11: mod_base = OTHER; note = 2'-O-methyl modified nucleoside
  modified_base 12: mod_base = OTHER; note = 2'-O-methyl modified nucleoside
  modified_base 13: mod_base = OTHER; note = 2'-O-methyl modified nucleoside
  modified_base 14: mod_base = OTHER; note = 2'-O-methyl modified nucleoside
  modified_base 15: mod_base = OTHER; note = 2'-O-methyl modified nucleoside
  modified_base 16: mod_base = OTHER; note = 2'-O-methyl modified nucleoside
  modified_base 17: mod_base = OTHER; note = 2'-O-methyl modified nucleoside
  modified_base 18: mod_base = OTHER; note = 2'-O-methyl modified nucleoside
  modified_base 19: mod_base = OTHER; note = 2'-O-methyl modified nucleoside with phosphorothioate linkage
  modified_base 20: mod_base = OTHER; note = 2'-O-methyl modified nucleoside with phosphorothioate linkage
  modified_base 21: mod_base = OTHER; note = 2'-O-methyl modified nucleoside
tgttattagaatgttacgatt

SEQ ID NO: 12827 - RNA, 21 nt, synthetic construct
  source 1..21: mol_type = other RNA
  modified_base 1: mod_base = OTHER; note = 2'-O-methyl modified nucleoside with phosphorothioate linkage
  modified_base 2: mod_base = OTHER; note = 2'-O-methyl modified nucleoside with phosphorothioate linkage
  modified_base 3: mod_base = OTHER; note = 2'-O-methyl modified nucleoside
  modified_base 4: mod_base = OTHER; note = 2'-O-methyl modified nucleoside
  modified_base 5: mod_base = OTHER; note = 2'-fluoro-modified nucleoside
  modified_base 6: mod_base = OTHER; note = 2'-O-methyl modified nucleoside
  modified_base 7: mod_base = OTHER; note = 2'-O-methyl modified nucleoside
  modified_base 8: mod_base = OTHER; note = 2'-fluoro-modified nucleoside
  modified_base 9: mod_base = OTHER; note = 2'-fluoro-modified nucleoside
  modified_base 10: mod_base = OTHER; note = 2'-fluoro-modified nucleoside
  modified_base 11: mod_base = OTHER; note = 2'-fluoro-modified nucleoside
  modified_base 12: mod_base = OTHER; note = 2'-O-methyl modified nucleoside
  modified_base 13: mod_base = OTHER; note = 2'-O-methyl modified nucleoside
  modified_base 14: mod_base = OTHER; note = 2'-O-methyl modified nucleoside
  modified_base 15: mod_base = OTHER; note = 2'-O-methyl modified nucleoside
  modified_base 16: mod_base = OTHER; note = 2'-O-methyl modified nucleoside
  modified_base 17: mod_base = OTHER; note = 2'-O-methyl modified nucleoside
  modified_base 18: mod_base = OTHER; note = 2'-O-methyl modified nucleoside
  modified_base 19: mod_base = OTHER; note = 2'-O-methyl modified nucleoside with phosphorothioate linkage
  modified_base 20: mod_base = OTHER; note = 2'-O-methyl modified nucleoside with phosphorothioate linkage
  modified_base 21: mod_base = OTHER; note = 2'-O-methyl modified nucleoside
tgttattagaatgttacgatt

SEQ ID NO: 12828 - RNA, 21 nt, synthetic construct
  source 1..21: mol_type = other RNA
  modified_base 1: mod_base = OTHER; note = 2'-O-methyl modified nucleoside with phosphorothioate linkage
  modified_base 2: mod_base = OTHER; note = 2'-O-methyl modified nucleoside with phosphorothioate linkage
  modified_base 3: mod_base = OTHER; note = 2'-O-methyl modified nucleoside
  modified_base 4: mod_base = OTHER; note = 2'-O-methyl modified nucleoside
  modified_base 5: mod_base = OTHER; note = 2'-O-methyl modified nucleoside
  modified_base 6: mod_base = OTHER; note = 2'-O-methyl modified nucleoside
  modified_base 7: mod_base = OTHER; note = 2'-fluoro-modified nucleoside
  modified_base 8: mod_base = OTHER; note = 2'-O-methyl modified nucleoside
  modified_base 9: mod_base = OTHER; note = 2'-fluoro-modified nucleoside
  modified_base 10: mod_base = OTHER; note = 2'-fluoro-modified nucleoside
  modified_base 11: mod_base = OTHER; note = 2'-O-methyl modified nucleoside
  modified_base 12: mod_base = OTHER; note = 2'-O-methyl modified nucleoside
  modified_base 13: mod_base = OTHER; note = 2'-O-methyl modified nucleoside
  modified_base 14: mod_base = OTHER; note = 2'-O-methyl modified nucleoside
  modified_base 15: mod_base = OTHER; note = 2'-O-methyl modified nucleoside
  modified_base 16: mod_base = OTHER; note = 2'-O-methyl modified nucleoside
  modified_base 17: mod_base = OTHER; note = 2'-O-methyl modified nucleoside
  modified_base 18: mod_base = OTHER; note = 2'-O-methyl modified nucleoside
  modified_base 19: mod_base = OTHER; note = 2'-O-methyl modified nucleoside with phosphorothioate linkage
  modified_base 20: mod_base = OTHER; note = 2'-O-methyl modified nucleoside with phosphorothioate linkage
  modified_base 21: mod_base = OTHER; note = 2'-O-methyl modified nucleoside
aagcgttgttaccagctaatt

SEQ ID NO: 12829 - RNA, 21 nt, synthetic construct
  source 1..21: mol_type = other RNA
  modified_base 1: mod_base = OTHER; note = 2'-O-methyl modified nucleoside with phosphorothioate linkage
  modified_base 2: mod_base = OTHER; note = 2'-O-methyl modified nucleoside with phosphorothioate linkage
  modified_base 3: mod_base = OTHER; note = 2'-O-methyl modified nucleoside
  modified_base 4: mod_base = OTHER; note = 2'-O-methyl modified nucleoside
  modified_base 5: mod_base = OTHER; note = 2'-O-methyl modified nucleoside
  modified_base 6: mod_base = OTHER; note = 2'-fluoro-modified nucleoside
  modified_base 7: mod_base = OTHER; note = 2'-O-methyl modified nucleoside
  modified_base 8: mod_base = OTHER; note = 2'-O-methyl modified nucleoside
  modified_base 9: mod_base = OTHER; note = 2'-fluoro-modified nucleoside
  modified_base 10: mod_base = OTHER; note = 2'-fluoro-modified nucleoside
  modified_base 11: mod_base = OTHER; note = 2'-O-methyl modified nucleoside
  modified_base 12: mod_base = OTHER; note = 2'-O-methyl modified nucleoside
  modified_base 13: mod_base = OTHER; note = 2'-O-methyl modified nucleoside
  modified_base 14: mod_base = OTHER; note = 2'-O-methyl modified nucleoside
  modified_base 15: mod_base = OTHER; note = 2'-O-methyl modified nucleoside
  modified_base 16: mod_base = OTHER; note = 2'-O-methyl modified nucleoside
  modified_base 17: mod_base = OTHER; note = 2'-O-methyl modified nucleoside
  modified_base 18: mod_base = OTHER; note = 2'-O-methyl modified nucleoside
  modified_base 19: mod_base = OTHER; note = 2'-O-methyl modified nucleoside with phosphorothioate linkage
  modified_base 20: mod_base = OTHER; note = 2'-O-methyl modified nucleoside with phosphorothioate linkage
  modified_base 21: mod_base = OTHER; note = 2'-O-methyl modified nucleoside
aagcgttgttaccagctaatt

SEQ ID NO: 12830 - RNA, 21 nt, synthetic construct
  source 1..21: mol_type = other RNA
  modified_base 1: mod_base = OTHER; note = 2'-O-methyl modified nucleoside with phosphorothioate linkage
  modified_base 2: mod_base = OTHER; note = 2'-O-methyl modified nucleoside with phosphorothioate linkage
  modified_base 3: mod_base = OTHER; note = 2'-O-methyl modified nucleoside
  modified_base 4: mod_base = OTHER; note = 2'-O-methyl modified nucleoside
  modified_base 5: mod_base = OTHER; note = 2'-O-methyl modified nucleoside
  modified_base 6: mod_base = OTHER; note = 2'-fluoro-modified nucleoside
  modified_base 7: mod_base = OTHER; note = 2'-fluoro-modified nucleoside
  modified_base 8: mod_base = OTHER; note = 2'-O-methyl modified nucleoside
  modified_base 9: mod_base = OTHER; note = 2'-fluoro-modified nucleoside
  modified_base 10: mod_base = OTHER; note = 2'-O-methyl modified nucleoside
  modified_base 11: mod_base = OTHER; note = 2'-O-methyl modified nucleoside
  modified_base 12: mod_base = OTHER; note = 2'-O-methyl modified nucleoside
  modified_base 13: mod_base = OTHER; note = 2'-O-methyl modified nucleoside
  modified_base 14: mod_base = OTHER; note = 2'-O-methyl modified nucleoside
  modified_base 15: mod_base = OTHER; note = 2'-O-methyl modified nucleoside
  modified_base 16: mod_base = OTHER; note = 2'-O-methyl modified nucleoside
  modified_base 17: mod_base = OTHER; note = 2'-O-methyl modified nucleoside
  modified_base 18: mod_base = OTHER; note = 2'-O-methyl modified nucleoside
  modified_base 19: mod_base = OTHER; note = 2'-O-methyl modified nucleoside with phosphorothioate linkage
  modified_base 20: mod_base = OTHER; note = 2'-O-methyl modified nucleoside with phosphorothioate linkage
  modified_base 21: mod_base = OTHER; note = 2'-O-methyl modified nucleoside
aagcgttgttaccagctaatt

SEQ ID NO: 12831 - RNA, 21 nt, synthetic construct
  source 1..21: mol_type = other RNA
  modified_base 1: mod_base = OTHER; note = 2'-O-methyl modified nucleoside with phosphorothioate linkage
  modified_base 2: mod_base = OTHER; note = 2'-O-methyl modified nucleoside with phosphorothioate linkage
  modified_base 3: mod_base = OTHER; note = 2'-O-methyl modified nucleoside
  modified_base 4: mod_base = OTHER; note = 2'-O-methyl modified nucleoside
  modified_base 5: mod_base = OTHER; note = 2'-O-methyl modified nucleoside
  modified_base 6: mod_base = OTHER; note = 2'-O-methyl modified nucleoside
  modified_base 7: mod_base = OTHER; note = 2'-fluoro-modified nucleoside
  modified_base 8: mod_base = OTHER; note = 2'-O-methyl modified nucleoside
  modified_base 9: mod_base = OTHER; note = 2'-fluoro-modified nucleoside
  modified_base 10: mod_base = OTHER; note = 2'-fluoro-modified nucleoside
  modified_base 11: mod_base = OTHER; note = 2'-O-methyl modified nucleoside
  modified_base 12: mod_base = OTHER; note = 2'-O-methyl modified nucleoside
  modified_base 13: mod_base = OTHER; note = 2'-O-methyl modified nucleoside
  modified_base 14: mod_base = OTHER; note = 2'-O-methyl modified nucleoside
  modified_base 15: mod_base = OTHER; note = 2'-O-methyl modified nucleoside
  modified_base 16: mod_base = OTHER; note = 2'-O-methyl modified nucleoside
  modified_base 17: mod_base = OTHER; note = 2'-O-methyl modified nucleoside
  modified_base 18: mod_base = OTHER; note = 2'-O-methyl modified nucleoside
  modified_base 19: mod_base = OTHER; note = 2'-O-methyl modified nucleoside with phosphorothioate linkage
  modified_base 20: mod_base = OTHER; note = 2'-O-methyl modified nucleoside with phosphorothioate linkage
  modified_base 21: mod_base = OTHER; note = 2'-O-methyl modified nucleoside
attcactgctagcaagtcatt

SEQ ID NO: 12832 - RNA, 21 nt, synthetic construct
  source 1..21: mol_type = other RNA
  modified_base 1: mod_base = OTHER; note = 2'-O-methyl modified nucleoside with phosphorothioate linkage
  modified_base 2: mod_base = OTHER; note = 2'-O-methyl modified nucleoside with phosphorothioate linkage
  modified_base 3: mod_base = OTHER; note = 2'-O-methyl modified nucleoside
  modified_base 4: mod_base = OTHER; note = 2'-O-methyl modified nucleoside
  modified_base 5: mod_base = OTHER; note = 2'-O-methyl modified nucleoside
  modified_base 6: mod_base = OTHER; note = 2'-fluoro-modified nucleoside
  modified_base 7: mod_base = OTHER; note = 2'-O-methyl modified nucleoside
  modified_base 8: mod_base = OTHER; note = 2'-O-methyl modified nucleoside
  modified_base 9: mod_base = OTHER; note = 2'-fluoro-modified nucleoside
  modified_base 10: mod_base = OTHER; note = 2'-fluoro-modified nucleoside
  modified_base 11: mod_base = OTHER; note = 2'-O-methyl modified nucleoside
  modified_base 12: mod_base = OTHER; note = 2'-O-methyl modified nucleoside
  modified_base 13: mod_base = OTHER; note = 2'-O-methyl modified nucleoside
  modified_base 14: mod_base = OTHER; note = 2'-O-methyl modified nucleoside
  modified_base 15: mod_base = OTHER; note = 2'-O-methyl modified nucleoside
  modified_base 16: mod_base = OTHER; note = 2'-O-methyl modified nucleoside
  modified_base 17: mod_base = OTHER; note = 2'-O-methyl modified nucleoside
  modified_base 18: mod_base = OTHER; note = 2'-O-methyl modified nucleoside
  modified_base 19: mod_base = OTHER; note = 2'-O-methyl modified nucleoside with phosphorothioate linkage
  modified_base 20: mod_base = OTHER; note = 2'-O-methyl modified nucleoside with phosphorothioate linkage
  modified_base 21: mod_base = OTHER; note = 2'-O-methyl modified nucleoside
attcactgctagcaagtcatt

SEQ ID NO: 12833 - RNA, 21 nt, synthetic construct
  source 1..21: mol_type = other RNA
  modified_base 1: mod_base = OTHER; note = 2'-O-methyl modified nucleoside with phosphorothioate linkage
  modified_base 2: mod_base = OTHER; note = 2'-O-methyl modified nucleoside with phosphorothioate linkage
  modified_base 3: mod_base = OTHER; note = 2'-O-methyl modified nucleoside
  modified_base 4: mod_base = OTHER; note = 2'-O-methyl modified nucleoside
  modified_base 5: mod_base = OTHER; note = 2'-O-methyl modified nucleoside
  modified_base 6: mod_base = OTHER; note = 2'-fluoro-modified nucleoside
  modified_base 7: mod_base = OTHER; note = 2'-fluoro-modified nucleoside
  modified_base 8: mod_base = OTHER; note = 2'-O-methyl modified nucleoside
  modified_base 9: mod_base = OTHER; note = 2'-fluoro-modified nucleoside
  modified_base 10: mod_base = OTHER; note = 2'-O-methyl modified nucleoside
  modified_base 11: mod_base = OTHER; note = 2'-O-methyl modified nucleoside
  modified_base 12: mod_base = OTHER; note = 2'-O-methyl modified nucleoside
  modified_base 13: mod_base = OTHER; note = 2'-O-methyl modified nucleoside
  modified_base 14: mod_base = OTHER; note = 2'-O-methyl modified nucleoside
  modified_base 15: mod_base = OTHER; note = 2'-O-methyl modified nucleoside
  modified_base 16: mod_base = OTHER; note = 2'-O-methyl modified nucleoside
  modified_base 17: mod_base = OTHER; note = 2'-O-methyl modified nucleoside
  modified_base 18: mod_base = OTHER; note = 2'-O-methyl modified nucleoside
  modified_base 19: mod_base = OTHER; note = 2'-O-methyl modified nucleoside with phosphorothioate linkage
  modified_base 20: mod_base = OTHER; note = 2'-O-methyl modified nucleoside with phosphorothioate linkage
  modified_base 21: mod_base = OTHER; note = 2'-O-methyl modified nucleoside
attcactgctagcaagtcatt

SEQ ID NO: 12834 - RNA, 21 nt, synthetic construct
  source 1..21: mol_type = other RNA
  modified_base 1: mod_base = OTHER; note = 2'-O-methyl modified nucleoside with phosphorothioate linkage
  modified_base 2: mod_base = OTHER; note = 2'-O-methyl modified nucleoside with phosphorothioate linkage
  modified_base 3: mod_base = OTHER; note = 2'-O-methyl modified nucleoside
  modified_base 4: mod_base = OTHER; note = 2'-O-methyl modified nucleoside
  modified_base 5: mod_base = OTHER; note = 2'-O-methyl modified nucleoside
  modified_base 6: mod_base = OTHER; note = 2'-O-methyl modified nucleoside
  modified_base 7: mod_base = OTHER; note = 2'-O-methyl modified nucleoside
  modified_base 8: mod_base = OTHER; note = 2'-fluoro-modified nucleoside
  modified_base 9: mod_base = OTHER; note = 2'-fluoro-modified nucleoside
  modified_base 10: mod_base = OTHER; note = 2'-O-methyl modified nucleoside
  modified_base 11: mod_base = OTHER; note = 2'-fluoro-modified nucleoside
  modified_base 12: mod_base = OTHER; note = 2'-O-methyl modified nucleoside
  modified_base 13: mod_base = OTHER; note = 2'-O-methyl modified nucleoside
  modified_base 14: mod_base = OTHER; note = 2'-O-methyl modified nucleoside
  modified_base 15: mod_base = OTHER; note = 2'-O-methyl modified nucleoside
  modified_base 16: mod_base = OTHER; note = 2'-O-methyl modified nucleoside
  modified_base 17: mod_base = OTHER; note = 2'-O-methyl modified nucleoside
  modified_base 18: mod_base = OTHER; note = 2'-O-methyl modified nucleoside
  modified_base 19: mod_base = OTHER; note = 2'-O-methyl modified nucleoside with phosphorothioate linkage
  modified_base 20: mod_base = OTHER; note = 2'-O-methyl modified nucleoside with phosphorothioate linkage
  modified_base 21: mod_base = OTHER; note = 2'-O-methyl modified nucleoside
aacagaaagaaatgttgcatt

SEQ ID NO: 12835 - RNA, 21 nt, synthetic construct
  source 1..21: mol_type = other RNA
  modified_base 1: mod_base = OTHER; note = 2'-O-methyl modified nucleoside with phosphorothioate linkage
  modified_base 2: mod_base = OTHER; note = 2'-O-methyl modified nucleoside with phosphorothioate linkage
  modified_base 3: mod_base = OTHER; note = 2'-O-methyl modified nucleoside
  modified_base 4: mod_base = OTHER; note = 2'-O-methyl modified nucleoside
  modified_base 5: mod_base = OTHER; note = 2'-O-methyl modified nucleoside
  modified_base 6: mod_base = OTHER; note = 2'-O-methyl modified nucleoside
  modified_base 7: mod_base = OTHER; note = 2'-O-methyl modified nucleoside
  modified_base 8: mod_base = OTHER; note = 2'-fluoro-modified nucleoside
  modified_base 9: mod_base = OTHER; note = 2'-fluoro-modified nucleoside
  modified_base 10: mod_base = OTHER; note = 2'-fluoro-modified nucleoside
  modified_base 11: mod_base = OTHER; note = 2'-fluoro-modified nucleoside
  modified_base 12: mod_base = OTHER; note = 2'-O-methyl modified nucleoside
  modified_base 13: mod_base = OTHER; note = 2'-O-methyl modified nucleoside
  modified_base 14: mod_base = OTHER; note = 2'-O-methyl modified nucleoside
  modified_base 15: mod_base = OTHER; note = 2'-O-methyl modified nucleoside
  modified_base 16: mod_base = OTHER; note = 2'-O-methyl modified nucleoside
  modified_base 17: mod_base = OTHER; note = 2'-O-methyl modified nucleoside
  modified_base 18: mod_base = OTHER; note = 2'-O-methyl modified nucleoside
  modified_base 19: mod_base = OTHER; note = 2'-O-methyl modified nucleoside with phosphorothioate linkage
  modified_base 20: mod_base = OTHER; note = 2'-O-methyl modified nucleoside with phosphorothioate linkage
  modified_base 21: mod_base = OTHER; note = 2'-O-methyl modified nucleoside
aacagaaagaaatgttgcatt

SEQ ID NO: 12836 - RNA, 21 nt, synthetic construct
  source 1..21: mol_type = other RNA
  modified_base 1: mod_base = OTHER; note = 2'-O-methyl modified nucleoside with phosphorothioate linkage
  modified_base 2: mod_base = OTHER; note = 2'-O-methyl modified nucleoside with phosphorothioate linkage
  modified_base 3: mod_base = OTHER; note = 2'-O-methyl modified nucleoside
  modified_base 4: mod_base = OTHER; note = 2'-O-methyl modified nucleoside
  modified_base 5: mod_base = OTHER; note = 2'-O-methyl modified nucleoside
  modified_base 6: mod_base = OTHER; note = 2'-O-methyl modified nucleoside
  modified_base 7: mod_base = OTHER; note = 2'-fluoro-modified nucleoside
  modified_base 8: mod_base = OTHER; note = 2'-O-methyl modified nucleoside
  modified_base 9: mod_base = OTHER; note = 2'-fluoro-modified nucleoside
  modified_base 10: mod_base = OTHER; note = 2'-O-methyl modified nucleoside
  modified_base 11: mod_base = OTHER; note = 2'-fluoro-modified nucleoside
  modified_base 12: mod_base = OTHER; note = 2'-O-methyl modified nucleoside
  modified_base 13: mod_base = OTHER; note = 2'-O-methyl modified nucleoside
  modified_base 14: mod_base = OTHER; note = 2'-O-methyl modified nucleoside
  modified_base 15: mod_base = OTHER; note = 2'-O-methyl modified nucleoside
  modified_base 16: mod_base = OTHER; note = 2'-O-methyl modified nucleoside
  modified_base 17: mod_base = OTHER; note = 2'-O-methyl modified nucleoside
  modified_base 18: mod_base = OTHER; note = 2'-O-methyl modified nucleoside
  modified_base 19: mod_base = OTHER; note = 2'-O-methyl modified nucleoside with phosphorothioate linkage
  modified_base 20: mod_base = OTHER; note = 2'-O-methyl modified nucleoside with phosphorothioate linkage
  modified_base 21: mod_base = OTHER; note = 2'-O-methyl modified nucleoside
aacagaaagaaatgttgcatt

SEQ ID NO: 12837 - RNA, 21 nt, synthetic construct
  source 1..21: mol_type = other RNA
  modified_base 1: mod_base = OTHER; note = 2'-O-methyl modified nucleoside with phosphorothioate linkage
  modified_base 2: mod_base = OTHER; note = 2'-O-methyl modified nucleoside with phosphorothioate linkage
  modified_base 3: mod_base = OTHER; note = 2'-O-methyl modified nucleoside
  modified_base 4: mod_base = OTHER; note = 2'-O-methyl modified nucleoside
  modified_base 5: mod_base = OTHER; note = 2'-O-methyl modified nucleoside
  modified_base 6: mod_base = OTHER; note = 2'-O-methyl modified nucleoside
  modified_base 7: mod_base = OTHER; note = 2'-fluoro-modified nucleoside
  modified_base 8: mod_base = OTHER; note = 2'-O-methyl modified nucleoside
  modified_base 9: mod_base = OTHER; note = 2'-fluoro-modified nucleoside
  modified_base 10: mod_base = OTHER; note = 2'-fluoro-modified nucleoside
  modified_base 11: mod_base = OTHER; note = 2'-O-methyl modified nucleoside
  modified_base 12: mod_base = OTHER; note = 2'-O-methyl modified nucleoside
  modified_base 13: mod_base = OTHER; note = 2'-O-methyl modified nucleoside
  modified_base 14: mod_base = OTHER; note = 2'-O-methyl modified nucleoside
  modified_base 15: mod_base = OTHER; note = 2'-O-methyl modified nucleoside
  modified_base 16: mod_base = OTHER; note = 2'-O-methyl modified nucleoside
  modified_base 17: mod_base = OTHER; note = 2'-O-methyl modified nucleoside
  modified_base 18: mod_base = OTHER; note = 2'-O-methyl modified nucleoside
  modified_base 19: mod_base = OTHER; note = 2'-O-methyl modified nucleoside with phosphorothioate linkage
  modified_base 20: mod_base = OTHER; note = 2'-O-methyl modified nucleoside with phosphorothioate linkage
  modified_base 21: mod_base = OTHER; note = 2'-O-methyl modified nucleoside
aacagaaagaaatgttgcatt

SEQ ID NO: 12838 - RNA, 21 nt, synthetic construct
  source 1..21: mol_type = other RNA
  modified_base 1: mod_base = OTHER; note = 2'-O-methyl modified nucleoside with phosphorothioate linkage
  modified_base 2: mod_base = OTHER; note = 2'-O-methyl modified nucleoside with phosphorothioate linkage
  modified_base 3: mod_base = OTHER; note = 2'-O-methyl modified nucleoside
  modified_base 4: mod_base = OTHER; note = 2'-O-methyl modified nucleoside
  modified_base 5: mod_base = OTHER; note = 2'-O-methyl modified nucleoside
  modified_base 6: mod_base = OTHER; note = 2'-O-methyl modified nucleoside
  modified_base 7: mod_base = OTHER; note = 2'-fluoro-modified nucleoside
  modified_base 8: mod_base = OTHER; note = 2'-fluoro-modified nucleoside
  modified_base 9: mod_base = OTHER; note = 2'-fluoro-modified nucleoside
  modified_base 10: mod_base = OTHER; note = 2'-fluoro-modified nucleoside
  modified_base 11: mod_base = OTHER; note = 2'-O-methyl modified nucleoside
  modified_base 12: mod_base = OTHER; note = 2'-O-methyl modified nucleoside
  modified_base 13: mod_base = OTHER; note = 2'-O-methyl modified nucleoside
  modified_base 14: mod_base = OTHER; note = 2'-O-methyl modified nucleoside
  modified_base 15: mod_base = OTHER; note = 2'-O-methyl modified nucleoside
  modified_base 16: mod_base = OTHER; note = 2'-O-methyl modified nucleoside
  modified_base 17: mod_base = OTHER; note = 2'-O-methyl modified nucleoside
  modified_base 18: mod_base = OTHER; note = 2'-O-methyl modified nucleoside
  modified_base 19: mod_base = OTHER; note = 2'-O-methyl modified nucleoside with phosphorothioate linkage
  modified_base 20: mod_base = OTHER; note = 2'-O-methyl modified nucleoside with phosphorothioate linkage
  modified_base 21: mod_base = OTHER; note = 2'-O-methyl modified nucleoside
aacagaaagaaatgttgcatt

SEQ ID NO: 12839 - RNA, 21 nt, synthetic construct
  source 1..21: mol_type = other RNA
  modified_base 1: mod_base = OTHER; note = 2'-O-methyl modified nucleoside with phosphorothioate linkage
  modified_base 2: mod_base = OTHER; note = 2'-O-methyl modified nucleoside with phosphorothioate linkage
  modified_base 3: mod_base = OTHER; note = 2'-O-methyl modified nucleoside
  modified_base 4: mod_base = OTHER; note = 2'-O-methyl modified nucleoside
  modified_base 5: mod_base = OTHER; note = 2'-O-methyl modified nucleoside
  modified_base 6: mod_base = OTHER; note = 2'-O-methyl modified nucleoside
  modified_base 7: mod_base = OTHER; note = 2'-fluoro-modified nucleoside
  modified_base 8: mod_base = OTHER; note = 2'-fluoro-modified nucleoside
  modified_base 9: mod_base = OTHER; note = 2'-fluoro-modified nucleoside
  modified_base 10: mod_base = OTHER; note = 2'-fluoro-modified nucleoside
  modified_base 11: mod_base = OTHER; note = 2'-fluoro-modified nucleoside
  modified_base 12: mod_base = OTHER; note = 2'-O-methyl modified nucleoside
  modified_base 13: mod_base = OTHER; note = 2'-O-methyl modified nucleoside
  modified_base 14: mod_base = OTHER; note = 2'-O-methyl modified nucleoside
  modified_base 15: mod_base = OTHER; note = 2'-O-methyl modified nucleoside
  modified_base 16: mod_base = OTHER; note = 2'-O-methyl modified nucleoside
  modified_base 17: mod_base = OTHER; note = 2'-O-methyl modified nucleoside
  modified_base 18: mod_base = OTHER; note = 2'-O-methyl modified nucleoside
  modified_base 19: mod_base = OTHER; note = 2'-O-methyl modified nucleoside with phosphorothioate linkage
  modified_base 20: mod_base = OTHER; note = 2'-O-methyl modified nucleoside with phosphorothioate linkage
  modified_base 21: mod_base = OTHER; note = 2'-O-methyl modified nucleoside
aacagaaagaaatgttgcatt

SEQ ID NO: 12840 - RNA, 21 nt, synthetic construct
  source 1..21: mol_type = other RNA
  modified_base 1: mod_base = OTHER; note = 2'-O-methyl modified nucleoside with phosphorothioate linkage
  modified_base 2: mod_base = OTHER; note = 2'-O-methyl modified nucleoside with phosphorothioate linkage
  modified_base 3: mod_base = OTHER; note = 2'-O-methyl modified nucleoside
  modified_base 4: mod_base = OTHER; note = 2'-O-methyl modified nucleoside
  modified_base 5: mod_base = OTHER; note = 2'-O-methyl modified nucleoside
  modified_base 6: mod_base = OTHER; note = 2'-fluoro-modified nucleoside
  modified_base 7: mod_base = OTHER; note = 2'-O-methyl modified nucleoside
  modified_base 8: mod_base = OTHER; note = 2'-O-methyl modified nucleoside
  modified_base 9: mod_base = OTHER; note = 2'-fluoro-modified nucleoside
  modified_base 10: mod_base = OTHER; note = 2'-O-methyl modified nucleoside
  modified_base 11: mod_base = OTHER; note = 2'-fluoro-modified nucleoside
  modified_base 12: mod_base = OTHER; note = 2'-O-methyl modified nucleoside
  modified_base 13: mod_base = OTHER; note = 2'-O-methyl modified nucleoside
  modified_base 14: mod_base = OTHER; note = 2'-O-methyl modified nucleoside
  modified_base 15: mod_base = OTHER; note = 2'-O-methyl modified nucleoside
  modified_base 16: mod_base = OTHER; note = 2'-O-methyl modified nucleoside
  modified_base 17: mod_base = OTHER; note = 2'-O-methyl modified nucleoside
  modified_base 18: mod_base = OTHER; note = 2'-O-methyl modified nucleoside
  modified_base 19: mod_base = OTHER; note = 2'-O-methyl modified nucleoside with phosphorothioate linkage
  modified_base 20: mod_base = OTHER; note = 2'-O-methyl modified nucleoside with phosphorothioate linkage
  modified_base 21: mod_base = OTHER; note = 2'-O-methyl modified nucleoside
aacagaaagaaatgttgcatt

SEQ ID NO: 12841 - RNA, 21 nt, synthetic construct
  source 1..21: mol_type = other RNA
  modified_base 1: mod_base = OTHER; note = 2'-O-methyl modified nucleoside with phosphorothioate linkage
  modified_base 2: mod_base = OTHER; note = 2'-O-methyl modified nucleoside with phosphorothioate linkage
  modified_base 3: mod_base = OTHER; note = 2'-O-methyl modified nucleoside
  modified_base 4: mod_base = OTHER; note = 2'-O-methyl modified nucleoside
  modified_base 5: mod_base = OTHER; note = 2'-O-methyl modified nucleoside
  modified_base 6: mod_base = OTHER; note = 2'-fluoro-modified nucleoside
  modified_base 7: mod_base = OTHER; note = 2'-O-methyl modified nucleoside
  modified_base 8: mod_base = OTHER; note = 2'-O-methyl modified nucleoside
  modified_base 9: mod_base = OTHER; note = 2'-fluoro-modified nucleoside
  modified_base 10: mod_base = OTHER; note = 2'-fluoro-modified nucleoside
  modified_base 11: mod_base = OTHER; note = 2'-O-methyl modified nucleoside
  modified_base 12: mod_base = OTHER; note = 2'-O-methyl modified nucleoside
  modified_base 13: mod_base = OTHER; note = 2'-O-methyl modified nucleoside
  modified_base 14: mod_base = OTHER; note = 2'-O-methyl modified nucleoside
  modified_base 15: mod_base = OTHER; note = 2'-O-methyl modified nucleoside
  modified_base 16: mod_base = OTHER; note = 2'-O-methyl modified nucleoside
  modified_base 17: mod_base = OTHER; note = 2'-O-methyl modified nucleoside
  modified_base 18: mod_base = OTHER; note = 2'-O-methyl modified nucleoside
  modified_base 19: mod_base = OTHER; note = 2'-O-methyl modified nucleoside with phosphorothioate linkage
  modified_base 20: mod_base = OTHER; note = 2'-O-methyl modified nucleoside with phosphorothioate linkage
  modified_base 21: mod_base = OTHER; note = 2'-O-methyl modified nucleoside
aacagaaagaaatgttgcatt

SEQ ID NO: 12842 - RNA, 21 nt, synthetic construct
  source 1..21: mol_type = other RNA
  modified_base 1: mod_base = OTHER; note = 2'-O-methyl modified nucleoside with phosphorothioate linkage
  modified_base 2: mod_base = OTHER; note = 2'-O-methyl modified nucleoside with phosphorothioate linkage
  modified_base 3: mod_base = OTHER; note = 2'-O-methyl modified nucleoside
  modified_base 4: mod_base = OTHER; note = 2'-O-methyl modified nucleoside
  modified_base 5: mod_base = OTHER; note = 2'-O-methyl modified nucleoside
  modified_base 6: mod_base = OTHER; note = 2'-fluoro-modified nucleoside
  modified_base 7: mod_base = OTHER; note = 2'-O-methyl modified nucleoside
  modified_base 8: mod_base = OTHER; note = 2'-fluoro-modified nucleoside
  modified_base 9: mod_base = OTHER; note = 2'-fluoro-modified nucleoside
  modified_base 10: mod_base = OTHER; note = 2'-O-methyl modified nucleoside
  modified_base 11: mod_base = OTHER; note = 2'-O-methyl modified nucleoside
  modified_base 12: mod_base = OTHER; note = 2'-O-methyl modified nucleoside
  modified_base 13: mod_base = OTHER; note = 2'-O-methyl modified nucleoside
  modified_base 14: mod_base = OTHER; note = 2'-O-methyl modified nucleoside
  modified_base 15: mod_base = OTHER; note = 2'-O-methyl modified nucleoside
  modified_base 16: mod_base = OTHER; note = 2'-O-methyl modified nucleoside
  modified_base 17: mod_base = OTHER; note = 2'-O-methyl modified nucleoside
  modified_base 18: mod_base = OTHER; note = 2'-O-methyl modified nucleoside
  modified_base 19: mod_base = OTHER; note = 2'-O-methyl modified nucleoside with phosphorothioate linkage
  modified_base 20: mod_base = OTHER; note = 2'-O-methyl modified nucleoside with phosphorothioate linkage
  modified_base 21: mod_base = OTHER; note = 2'-O-methyl modified nucleoside
aacagaaagaaatgttgcatt

SEQ ID NO: 12843 - RNA, 21 nt, synthetic construct
  source 1..21: mol_type = other RNA
  modified_base 1: mod_base = OTHER; note = 2'-O-methyl modified nucleoside with phosphorothioate linkage
  modified_base 2: mod_base = OTHER; note = 2'-O-methyl modified nucleoside with phosphorothioate linkage
  modified_base 3: mod_base = OTHER; note = 2'-O-methyl modified nucleoside
  modified_base 4: mod_base = OTHER; note = 2'-O-methyl modified nucleoside
  modified_base 5: mod_base = OTHER; note = 2'-O-methyl modified nucleoside
  modified_base 6: mod_base = OTHER; note = 2'-fluoro-modified nucleoside
  modified_base 7: mod_base = OTHER; note = 2'-O-methyl modified nucleoside
  modified_base 8: mod_base = OTHER; note = 2'-fluoro-modified nucleoside
  modified_base 9: mod_base = OTHER; note = 2'-fluoro-modified nucleoside
  modified_base 10: mod_base = OTHER; note = 2'-O-methyl modified nucleoside
  modified_base 11: mod_base = OTHER; note = 2'-fluoro-modified nucleoside
  modified_base 12: mod_base = OTHER; note = 2'-O-methyl modified nucleoside
  modified_base 13: mod_base = OTHER; note = 2'-O-methyl modified nucleoside
  modified_base 14: mod_base = OTHER; note = 2'-O-methyl modified nucleoside
  modified_base 15: mod_base = OTHER; note = 2'-O-methyl modified nucleoside
  modified_base 16: mod_base = OTHER; note = 2'-O-methyl modified nucleoside
  modified_base 17: mod_base = OTHER; note = 2'-O-methyl modified nucleoside
  modified_base 18: mod_base = OTHER; note = 2'-O-methyl modified nucleoside
  modified_base 19: mod_base = OTHER; note = 2'-O-methyl modified nucleoside with phosphorothioate linkage
  modified_base 20: mod_base = OTHER; note = 2'-O-methyl modified nucleoside with phosphorothioate linkage
  modified_base 21: mod_base = OTHER; note = 2'-O-methyl modified nucleoside
aacagaaagaaatgttgcatt

SEQ ID NO: 12844 - RNA, 21 nt, synthetic construct
  source 1..21: mol_type = other RNA
  modified_base 1: mod_base = OTHER; note = 2'-O-methyl modified nucleoside with phosphorothioate linkage
  modified_base 2: mod_base = OTHER; note = 2'-O-methyl modified nucleoside with phosphorothioate linkage
  modified_base 3: mod_base = OTHER; note = 2'-O-methyl modified nucleoside
  modified_base 4: mod_base = OTHER; note = 2'-O-methyl modified nucleoside
  modified_base 5: mod_base = OTHER; note = 2'-O-methyl modified nucleoside
  modified_base 6: mod_base = OTHER; note = 2'-fluoro-modified nucleoside
  modified_base 7: mod_base = OTHER; note = 2'-O-methyl modified nucleoside
  modified_base 8: mod_base = OTHER; note = 2'-fluoro-modified nucleoside
  modified_base 9: mod_base = OTHER; note = 2'-fluoro-modified nucleoside
  modified_base 10: mod_base = OTHER; note = 2'-fluoro-modified nucleoside
  modified_base 11: mod_base = OTHER; note = 2'-fluoro-modified nucleoside
  modified_base 12: mod_base = OTHER; note = 2'-O-methyl modified nucleoside
  modified_base 13: mod_base = OTHER; note = 2'-O-methyl modified nucleoside
  modified_base 14: mod_base = OTHER; note = 2'-O-methyl modified nucleoside
  modified_base 15: mod_base = OTHER; note = 2'-O-methyl modified nucleoside
  modified_base 16: mod_base = OTHER; note = 2'-O-methyl modified nucleoside
  modified_base 17: mod_base = OTHER; note = 2'-O-methyl modified nucleoside
  modified_base 18: mod_base = OTHER; note = 2'-O-methyl modified nucleoside
  modified_base 19: mod_base = OTHER; note = 2'-O-methyl modified nucleoside with phosphorothioate linkage
  modified_base 20: mod_base = OTHER; note = 2'-O-methyl modified nucleoside with phosphorothioate linkage
  modified_base 21: mod_base = OTHER; note = 2'-O-methyl modified nucleoside
aacagaaagaaatgttgcatt

SEQ ID NO: 12845 - RNA, 21 nt, synthetic construct
  source 1..21: mol_type = other RNA
  modified_base 1: mod_base = OTHER; note = 2'-O-methyl modified nucleoside with phosphorothioate linkage
  modified_base 2: mod_base = OTHER; note = 2'-O-methyl modified nucleoside with phosphorothioate linkage
  modified_base 3: mod_base = OTHER; note = 2'-O-methyl modified nucleoside
  modified_base 4: mod_base = OTHER; note = 2'-O-methyl modified nucleoside
  modified_base 5: mod_base = OTHER; note = 2'-O-methyl modified nucleoside
  modified_base 6: mod_base = OTHER; note = 2'-fluoro-modified nucleoside
  modified_base 7: mod_base = OTHER; note = 2'-fluoro-modified nucleoside
  modified_base 8: mod_base = OTHER; note = 2'-O-methyl modified nucleoside
  modified_base 9: mod_base = OTHER; note = 2'-fluoro-modified nucleoside
  modified_base 10: mod_base = OTHER; note = 2'-O-methyl modified nucleoside
  modified_base 11: mod_base = OTHER; note = 2'-O-methyl modified nucleoside
  modified_base 12: mod_base = OTHER; note = 2'-O-methyl modified nucleoside
  modified_base 13: mod_base = OTHER; note = 2'-O-methyl modified nucleoside
  modified_base 14: mod_base = OTHER; note = 2'-O-methyl modified nucleoside
  modified_base 15: mod_base = OTHER; note = 2'-O-methyl modified nucleoside
  modified_base 16: mod_base = OTHER; note = 2'-O-methyl modified nucleoside
  modified_base 17: mod_base = OTHER; note = 2'-O-methyl modified nucleoside
  modified_base 18: mod_base = OTHER; note = 2'-O-methyl modified nucleoside
  modified_base 19: mod_base = OTHER; note = 2'-O-methyl modified nucleoside with phosphorothioate linkage
  modified_base 20: mod_base = OTHER; note = 2'-O-methyl modified nucleoside with phosphorothioate linkage
  modified_base 21: mod_base = OTHER; note = 2'-O-methyl modified nucleoside
aacagaaagaaatgttgcatt

SEQ ID NO: 12846 - RNA, 21 nt, synthetic construct
  source 1..21: mol_type = other RNA
  modified_base 1: mod_base = OTHER; note = 2'-O-methyl modified nucleoside with phosphorothioate linkage
  modified_base 2: mod_base = OTHER; note = 2'-O-methyl modified nucleoside with phosphorothioate linkage
  modified_base 3: mod_base = OTHER; note = 2'-O-methyl modified nucleoside
  modified_base 4: mod_base = OTHER; note = 2'-O-methyl modified nucleoside
  modified_base 5: mod_base = OTHER; note = 2'-O-methyl modified nucleoside
  modified_base 6: mod_base = OTHER; note = 2'-fluoro-modified nucleoside
  modified_base 7: mod_base = OTHER; note = 2'-fluoro-modified nucleoside
  modified_base 8: mod_base = OTHER; note = 2'-O-methyl modified nucleoside
  modified_base 9: mod_base = OTHER; note = 2'-fluoro-modified nucleoside
  modified_base 10: mod_base = OTHER; note = 2'-O-methyl modified nucleoside
  modified_base 11: mod_base = OTHER; note = 2'-fluoro-modified nucleoside
  modified_base 12: mod_base = OTHER; note = 2'-O-methyl modified nucleoside
  modified_base 13: mod_base = OTHER; note = 2'-O-methyl modified nucleoside
  modified_base 14: mod_base = OTHER; note = 2'-O-methyl modified nucleoside
  modified_base 15: mod_base = OTHER; note = 2'-O-methyl modified nucleoside
  modified_base 16: mod_base = OTHER; note = 2'-O-methyl modified nucleoside
  modified_base 17: mod_base = OTHER; note = 2'-O-methyl modified nucleoside
  modified_base 18: mod_base = OTHER; note = 2'-O-methyl modified nucleoside
  modified_base 19: mod_base = OTHER; note = 2'-O-methyl modified nucleoside with phosphorothioate linkage
  modified_base 20: mod_base = OTHER; note = 2'-O-methyl modified nucleoside with phosphorothioate linkage
  modified_base 21: mod_base = OTHER; note = 2'-O-methyl modified nucleoside
aacagaaagaaatgttgcatt

SEQ ID NO: 12847 - RNA, 21 nt, synthetic construct
  source 1..21: mol_type = other RNA
  modified_base 1: mod_base = OTHER; note = 2'-O-methyl modified nucleoside with phosphorothioate linkage
  modified_base 2: mod_base = OTHER; note = 2'-O-methyl modified nucleoside with phosphorothioate linkage
  modified_base 3: mod_base = OTHER; note = 2'-O-methyl modified nucleoside
  modified_base 4: mod_base = OTHER; note = 2'-O-methyl modified nucleoside
  modified_base 5: mod_base = OTHER; note = 2'-O-methyl modified nucleoside
  modified_base 6: mod_base = OTHER; note = 2'-fluoro-modified nucleoside
  modified_base 7: mod_base = OTHER; note = 2'-fluoro-modified nucleoside
  modified_base 8: mod_base = OTHER; note = 2'-O-methyl modified nucleoside
  modified_base 9: mod_base = OTHER; note = 2'-fluoro-modified nucleoside
  modified_base 10: mod_base = OTHER; note = 2'-fluoro-modified nucleoside
  modified_base 11: mod_base = OTHER; note = 2'-O-methyl modified nucleoside
  modified_base 12: mod_base = OTHER; note = 2'-O-methyl modified nucleoside
  modified_base 13: mod_base = OTHER; note = 2'-O-methyl modified nucleoside
  modified_base 14: mod_base = OTHER; note = 2'-O-methyl modified nucleoside
  modified_base 15: mod_base = OTHER; note = 2'-O-methyl modified nucleoside
  modified_base 16: mod_base = OTHER; note = 2'-O-methyl modified nucleoside
  modified_base 17: mod_base = OTHER; note = 2'-O-methyl modified nucleoside
  modified_base 18: mod_base = OTHER; note = 2'-O-methyl modified nucleoside
  modified_base 19: mod_base = OTHER; note = 2'-O-methyl modified nucleoside with phosphorothioate linkage
  modified_base 20: mod_base = OTHER; note = 2'-O-methyl modified nucleoside with phosphorothioate linkage
  modified_base 21: mod_base = OTHER; note = 2'-O-methyl modified nucleoside
aacagaaagaaatgttgcatt

SEQ ID NO: 12848 - RNA, 21 nt, synthetic construct
  source 1..21: mol_type = other RNA
  modified_base 1: mod_base = OTHER; note = 2'-O-methyl modified nucleoside with phosphorothioate linkage
  modified_base 2: mod_base = OTHER; note = 2'-O-methyl modified nucleoside with phosphorothioate linkage
  modified_base 3: mod_base = OTHER; note = 2'-O-methyl modified nucleoside
  modified_base 4: mod_base = OTHER; note = 2'-O-methyl modified nucleoside
  modified_base 5: mod_base = OTHER; note = 2'-O-methyl modified nucleoside
  modified_base 6: mod_base = OTHER; note = 2'-fluoro-modified nucleoside
  modified_base 7: mod_base = OTHER; note = 2'-fluoro-modified nucleoside
  modified_base 8: mod_base = OTHER; note = 2'-fluoro-modified nucleoside
  modified_base 9: mod_base = OTHER; note = 2'-fluoro-modified nucleoside
  modified_base 10: mod_base = OTHER; note = 2'-O-methyl modified nucleoside
  modified_base 11: mod_base = OTHER; note = 2'-O-methyl modified nucleoside
  modified_base 12: mod_base = OTHER; note = 2'-O-methyl modified nucleoside
  modified_base 13: mod_base = OTHER; note = 2'-O-methyl modified nucleoside
  modified_base 14: mod_base = OTHER; note = 2'-O-methyl modified nucleoside
  modified_base 15: mod_base = OTHER; note = 2'-O-methyl modified nucleoside
  modified_base 16: mod_base = OTHER; note = 2'-O-methyl modified nucleoside
  modified_base 17: mod_base = OTHER; note = 2'-O-methyl modified nucleoside
  modified_base 18: mod_base = OTHER; note = 2'-O-methyl modified nucleoside
  modified_base 19: mod_base = OTHER; note = 2'-O-methyl modified nucleoside with phosphorothioate linkage
  modified_base 20: mod_base = OTHER; note = 2'-O-methyl modified nucleoside with phosphorothioate linkage
  modified_base 21: mod_base = OTHER; note = 2'-O-methyl modified nucleoside
aacagaaagaaatgttgcatt

SEQ ID NO: 12849 - RNA, 21 nt, synthetic construct
  source 1..21: mol_type = other RNA
  modified_base 1: mod_base = OTHER; note = 2'-O-methyl modified nucleoside with phosphorothioate linkage
  modified_base 2: mod_base = OTHER; note = 2'-O-methyl modified nucleoside with phosphorothioate linkage
  modified_base 3: mod_base = OTHER; note = 2'-O-methyl modified nucleoside
  modified_base 4: mod_base = OTHER; note = 2'-O-methyl modified nucleoside
  modified_base 5: mod_base = OTHER; note = 2'-O-methyl modified nucleoside
  modified_base 6: mod_base = OTHER; note = 2'-fluoro-modified nucleoside
  modified_base 7: mod_base = OTHER; note = 2'-fluoro-modified nucleoside
  modified_base 8: mod_base = OTHER; note = 2'-fluoro-modified nucleoside
  modified_base 9: mod_base = OTHER; note = 2'-fluoro-modified nucleoside
  modified_base 10: mod_base = OTHER; note = 2'-O-methyl modified nucleoside
  modified_base 11: mod_base = OTHER; note = 2'-fluoro-modified nucleoside
  modified_base 12: mod_base = OTHER; note = 2'-O-methyl modified nucleoside
  modified_base 13: mod_base = OTHER; note = 2'-O-methyl modified nucleoside
  modified_base 14: mod_base = OTHER; note = 2'-O-methyl modified nucleoside
  modified_base 15: mod_base = OTHER; note = 2'-O-methyl modified nucleoside
  modified_base 16: mod_base = OTHER; note = 2'-O-methyl modified nucleoside
  modified_base 17: mod_base = OTHER; note = 2'-O-methyl modified nucleoside
  modified_base 18: mod_base = OTHER; note = 2'-O-methyl modified nucleoside
  modified_base 19: mod_base = OTHER; note = 2'-O-methyl modified nucleoside with phosphorothioate linkage
  modified_base 20: mod_base = OTHER; note = 2'-O-methyl modified nucleoside with phosphorothioate linkage
  modified_base 21: mod_base = OTHER; note = 2'-O-methyl modified nucleoside
aacagaaagaaatgttgcatt

SEQ ID NO: 12850 - RNA, 21 nt, synthetic construct
  source 1..21: mol_type = other RNA
  modified_base 1: mod_base = OTHER; note = 2'-O-methyl modified nucleoside with phosphorothioate linkage
  modified_base 2: mod_base = OTHER; note = 2'-O-methyl modified nucleoside with phosphorothioate linkage
  modified_base 3: mod_base = OTHER; note = 2'-O-methyl modified nucleoside
  modified_base 4: mod_base = OTHER; note = 2'-O-methyl modified nucleoside
  modified_base 5: mod_base = OTHER; note = 2'-O-methyl modified nucleoside
  modified_base 6: mod_base = OTHER; note = 2'-fluoro-modified nucleoside
  modified_base 7: mod_base = OTHER; note = 2'-fluoro-modified nucleoside
  modified_base 8: mod_base = OTHER; note = 2'-fluoro-modified nucleoside
  modified_base 9: mod_base = OTHER; note = 2'-fluoro-modified nucleoside
  modified_base 10: mod_base = OTHER; note = 2'-fluoro-modified nucleoside
  modified_base 11: mod_base = OTHER; note = 2'-O-methyl modified nucleoside
  modified_base 12: mod_base = OTHER; note = 2'-O-methyl modified nucleoside
  modified_base 13: mod_base = OTHER; note = 2'-O-methyl modified nucleoside
  modified_base 14: mod_base = OTHER; note = 2'-O-methyl modified nucleoside
  modified_base 15: mod_base = OTHER; note = 2'-O-methyl modified nucleoside
  modified_base 16: mod_base = OTHER; note = 2'-O-methyl modified nucleoside
  modified_base 17: mod_base = OTHER; note = 2'-O-methyl modified nucleoside
  modified_base 18: mod_base = OTHER; note = 2'-O-methyl modified nucleoside
  modified_base 19: mod_base = OTHER; note = 2'-O-methyl modified nucleoside with phosphorothioate linkage
  modified_base 20: mod_base = OTHER; note = 2'-O-methyl modified nucleoside with phosphorothioate linkage
  modified_base 21: mod_base = OTHER; note = 2'-O-methyl modified nucleoside
aacagaaagaaatgttgcatt

SEQ ID NO: 12851 - RNA, 21 nt, synthetic construct
  source 1..21: mol_type = other RNA
  modified_base 1: mod_base = OTHER; note = 2'-O-methyl modified nucleoside with phosphorothioate linkage
  modified_base 2: mod_base = OTHER; note = 2'-O-methyl modified nucleoside with phosphorothioate linkage
  modified_base 3: mod_base = OTHER; note = 2'-O-methyl modified nucleoside
  modified_base 4: mod_base = OTHER; note = 2'-O-methyl modified nucleoside
  modified_base 5: mod_base = OTHER; note = 2'-fluoro-modified nucleoside
  modified_base 6: mod_base = OTHER; note = 2'-O-methyl modified nucleoside
  modified_base 7: mod_base = OTHER; note = 2'-O-methyl modified nucleoside
  modified_base 8: mod_base = OTHER; note = 2'-O-methyl modified nucleoside
  modified_base 9: mod_base = OTHER; note = 2'-fluoro-modified nucleoside
  modified_base 10: mod_base = OTHER; note = 2'-O-methyl modified nucleoside
  modified_base 11: mod_base = OTHER; note = 2'-fluoro-modified nucleoside
  modified_base 12: mod_base = OTHER; note = 2'-O-methyl modified nucleoside
  modified_base 13: mod_base = OTHER; note = 2'-O-methyl modified nucleoside
  modified_base 14: mod_base = OTHER; note = 2'-O-methyl modified nucleoside
  modified_base 15: mod_base = OTHER; note = 2'-O-methyl modified nucleoside
  modified_base 16: mod_base = OTHER; note = 2'-O-methyl modified nucleoside
  modified_base 17: mod_base = OTHER; note = 2'-O-methyl modified nucleoside
  modified_base 18: mod_base = OTHER; note = 2'-O-methyl modified nucleoside
  modified_base 19: mod_base = OTHER; note = 2'-O-methyl modified nucleoside with phosphorothioate linkage
  modified_base 20: mod_base = OTHER; note = 2'-O-methyl modified nucleoside with phosphorothioate linkage
  modified_base 21: mod_base = OTHER; note = 2'-O-methyl modified nucleoside
aacagaaagaaatgttgcatt

SEQ ID NO: 12852 - RNA, 21 nt, synthetic construct
  source 1..21: mol_type = other RNA
  modified_base 1: mod_base = OTHER; note = 2'-O-methyl modified nucleoside with phosphorothioate linkage
  modified_base 2: mod_base = OTHER; note = 2'-O-methyl modified nucleoside with phosphorothioate linkage
  modified_base 3: mod_base = OTHER; note = 2'-O-methyl modified nucleoside
  modified_base 4: mod_base = OTHER; note = 2'-O-methyl modified nucleoside
  modified_base 5: mod_base = OTHER; note = 2'-fluoro-modified nucleoside
  modified_base 6: mod_base = OTHER; note = 2'-O-methyl modified nucleoside
  modified_base 7: mod_base = OTHER; note = 2'-O-methyl modified nucleoside
  modified_base 8: mod_base = OTHER; note = 2'-O-methyl modified nucleoside
  modified_base 9: mod_base = OTHER; note = 2'-fluoro-modified nucleoside
  modified_base 10: mod_base = OTHER; note = 2'-fluoro-modified nucleoside
  modified_base 11: mod_base = OTHER; note = 2'-O-methyl modified nucleoside
  modified_base 12: mod_base = OTHER; note = 2'-O-methyl modified nucleoside
  modified_base 13: mod_base = OTHER; note = 2'-O-methyl modified nucleoside
  modified_base 14: mod_base = OTHER; note = 2'-O-methyl modified nucleoside
  modified_base 15: mod_base = OTHER; note = 2'-O-methyl modified nucleoside
  modified_base 16: mod_base = OTHER; note = 2'-O-methyl modified nucleoside
  modified_base 17: mod_base = OTHER; note = 2'-O-methyl modified nucleoside
  modified_base 18: mod_base = OTHER; note = 2'-O-methyl modified nucleoside
  modified_base 19: mod_base = OTHER; note = 2'-O-methyl modified nucleoside with phosphorothioate linkage
  modified_base 20: mod_base = OTHER; note = 2'-O-methyl modified nucleoside with phosphorothioate linkage
  modified_base 21: mod_base = OTHER; note = 2'-O-methyl modified nucleoside
aacagaaagaaatgttgcatt

SEQ ID NO: 12853 - RNA, 21 nt, synthetic construct
  source 1..21: mol_type = other RNA
  modified_base 1: mod_base = OTHER; note = 2'-O-methyl modified nucleoside with phosphorothioate linkage
  modified_base 2: mod_base = OTHER; note = 2'-O-methyl modified nucleoside with phosphorothioate linkage
  modified_base 3: mod_base = OTHER; note = 2'-O-methyl modified nucleoside
  modified_base 4: mod_base = OTHER; note = 2'-O-methyl modified nucleoside
  modified_base 5: mod_base = OTHER; note = 2'-fluoro-modified nucleoside
  modified_base 6: mod_base = OTHER; note = 2'-O-methyl modified nucleoside
  modified_base 7: mod_base = OTHER; note = 2'-O-methyl modified nucleoside
  modified_base 8: mod_base = OTHER; note = 2'-fluoro-modified nucleoside
  modified_base 9: mod_base = OTHER; note = 2'-fluoro-modified nucleoside
  modified_base 10: mod_base = OTHER; note = 2'-O-methyl modified nucleoside
  modified_base 11: mod_base = OTHER; note = 2'-O-methyl modified nucleoside
  modified_base 12: mod_base = OTHER; note = 2'-O-methyl modified nucleoside
  modified_base 13: mod_base = OTHER; note = 2'-O-methyl modified nucleoside
  modified_base 14: mod_base = OTHER; note = 2'-O-methyl modified nucleoside
  modified_base 15: mod_base = OTHER; note = 2'-O-methyl modified nucleoside
  modified_base 16: mod_base = OTHER; note = 2'-O-methyl modified nucleoside
  modified_base 17: mod_base = OTHER; note = 2'-O-methyl modified nucleoside
  modified_base 18: mod_base = OTHER; note = 2'-O-methyl modified nucleoside
  modified_base 19: mod_base = OTHER; note = 2'-O-methyl modified nucleoside with phosphorothioate linkage
  modified_base 20: mod_base = OTHER; note = 2'-O-methyl modified nucleoside with phosphorothioate linkage
  modified_base 21: mod_base = OTHER; note = 2'-O-methyl modified nucleoside
aacagaaagaaatgttgcatt

SEQ ID NO: 12854 - RNA, 21 nt, synthetic construct
  source 1..21: mol_type = other RNA
  modified_base 1: mod_base = OTHER; note = 2'-O-methyl modified nucleoside with phosphorothioate linkage
  modified_base 2: mod_base = OTHER; note = 2'-O-methyl modified nucleoside with phosphorothioate linkage
  modified_base 3: mod_base = OTHER; note = 2'-O-methyl modified nucleoside
  modified_base 4: mod_base = OTHER; note = 2'-O-methyl modified nucleoside
  modified_base 5: mod_base = OTHER; note = 2'-fluoro-modified nucleoside
  modified_base 6: mod_base = OTHER; note = 2'-O-methyl modified nucleoside
  modified_base 7: mod_base = OTHER; note = 2'-O-methyl modified nucleoside
  modified_base 8: mod_base = OTHER; note = 2'-fluoro-modified nucleoside
  modified_base 9: mod_base = OTHER; note = 2'-fluoro-modified nucleoside
  modified_base 10: mod_base = OTHER; note = 2'-O-methyl modified nucleoside
  modified_base 11: mod_base = OTHER; note = 2'-fluoro-modified nucleoside
  modified_base 12: mod_base = OTHER; note = 2'-O-methyl modified nucleoside
  modified_base 13: mod_base = OTHER; note = 2'-O-methyl modified nucleoside
  modified_base 14: mod_base = OTHER; note = 2'-O-methyl modified nucleoside
  modified_base 15: mod_base = OTHER; note = 2'-O-methyl modified nucleoside
  modified_base 16: mod_base = OTHER; note = 2'-O-methyl modified nucleoside
  modified_base 17: mod_base = OTHER; note = 2'-O-methyl modified nucleoside
  modified_base 18: mod_base = OTHER; note = 2'-O-methyl modified nucleoside
  modified_base 19: mod_base = OTHER; note = 2'-O-methyl modified nucleoside with phosphorothioate linkage
  modified_base 20: mod_base = OTHER; note = 2'-O-methyl modified nucleoside with phosphorothioate linkage
  modified_base 21: mod_base = OTHER; note = 2'-O-methyl modified nucleoside
aacagaaagaaatgttgcatt

SEQ ID NO: 12855 - RNA, 21 nt, synthetic construct
  source 1..21: mol_type = other RNA
  modified_base 1: mod_base = OTHER; note = 2'-O-methyl modified nucleoside with phosphorothioate linkage
  modified_base 2: mod_base = OTHER; note = 2'-O-methyl modified nucleoside with phosphorothioate linkage
  modified_base 3: mod_base = OTHER; note = 2'-O-methyl modified nucleoside
  modified_base 4: mod_base = OTHER; note = 2'-O-methyl modified nucleoside
  modified_base 5: mod_base = OTHER; note = 2'-fluoro-modified nucleoside
  modified_base 6: mod_base = OTHER; note = 2'-O-methyl modified nucleoside
  modified_base 7: mod_base = OTHER; note = 2'-O-methyl modified nucleoside
  modified_base 8: mod_base = OTHER; note = 2'-fluoro-modified nucleoside
  modified_base 9: mod_base = OTHER; note = 2'-fluoro-modified nucleoside
  modified_base 10: mod_base = OTHER; note = 2'-fluoro-modified nucleoside
  modified_base 11: mod_base = OTHER; note = 2'-fluoro-modified nucleoside
  modified_base 12: mod_base = OTHER; note = 2'-O-methyl modified nucleoside
  modified_base 13: mod_base = OTHER; note = 2'-O-methyl modified nucleoside
  modified_base 14: mod_base = OTHER; note = 2'-O-methyl modified nucleoside
  modified_base 15: mod_base = OTHER; note = 2'-O-methyl modified nucleoside
  modified_base 16: mod_base = OTHER; note = 2'-O-methyl modified nucleoside
  modified_base 17: mod_base = OTHER; note = 2'-O-methyl modified nucleoside
  modified_base 18: mod_base = OTHER; note = 2'-O-methyl modified nucleoside
  modified_base 19: mod_base = OTHER; note = 2'-O-methyl modified nucleoside with phosphorothioate linkage
  modified_base 20: mod_base = OTHER; note = 2'-O-methyl modified nucleoside with phosphorothioate linkage
  modified_base 21: mod_base = OTHER; note = 2'-O-methyl modified nucleoside
aacagaaagaaatgttgcatt

SEQ ID NO: 12856 - RNA, 21 nt, synthetic construct
  source 1..21: mol_type = other RNA
  modified_base 1: mod_base = OTHER; note = 2'-O-methyl modified nucleoside with phosphorothioate linkage
  modified_base 2: mod_base = OTHER; note = 2'-O-methyl modified nucleoside with phosphorothioate linkage
  modified_base 3: mod_base = OTHER; note = 2'-O-methyl modified nucleoside
  modified_base 4: mod_base = OTHER; note = 2'-O-methyl modified nucleoside
  modified_base 5: mod_base = OTHER; note = 2'-fluoro-modified nucleoside
  modified_base 6: mod_base = OTHER; note = 2'-O-methyl modified nucleoside
  modified_base 7: mod_base = OTHER; note = 2'-fluoro-modified nucleoside
  modified_base 8: mod_base = OTHER; note = 2'-O-methyl modified nucleoside
  modified_base 9: mod_base = OTHER; note = 2'-fluoro-modified nucleoside
  modified_base 10: mod_base = OTHER; note = 2'-O-methyl modified nucleoside
  modified_base 11: mod_base = OTHER; note = 2'-O-methyl modified nucleoside
  modified_base 12: mod_base = OTHER; note = 2'-O-methyl modified nucleoside
  modified_base 13: mod_base = OTHER; note = 2'-O-methyl modified nucleoside
  modified_base 14: mod_base = OTHER; note = 2'-O-methyl modified nucleoside
  modified_base 15: mod_base = OTHER; note = 2'-O-methyl modified nucleoside
  modified_base 16: mod_base = OTHER; note = 2'-O-methyl modified nucleoside
  modified_base 17: mod_base = OTHER; note = 2'-O-methyl modified nucleoside
  modified_base 18: mod_base = OTHER; note = 2'-O-methyl modified nucleoside
  modified_base 19: mod_base = OTHER; note = 2'-O-methyl modified nucleoside with phosphorothioate linkage
  modified_base 20: mod_base = OTHER; note = 2'-O-methyl modified nucleoside with phosphorothioate linkage
  modified_base 21: mod_base = OTHER; note = 2'-O-methyl modified nucleoside
aacagaaagaaatgttgcatt

SEQ ID NO: 12857 - RNA, 21 nt, synthetic construct
  source 1..21: mol_type = other RNA
  modified_base 1: mod_base = OTHER; note = 2'-O-methyl modified nucleoside with phosphorothioate linkage
  modified_base 2: mod_base = OTHER; note = 2'-O-methyl modified nucleoside with phosphorothioate linkage
  modified_base 3: mod_base = OTHER; note = 2'-O-methyl modified nucleoside
  modified_base 4: mod_base = OTHER; note = 2'-O-methyl modified nucleoside
  modified_base 5: mod_base = OTHER; note = 2'-fluoro-modified nucleoside
  modified_base 6: mod_base = OTHER; note = 2'-O-methyl modified nucleoside
  modified_base 7: mod_base = OTHER; note = 2'-fluoro-modified nucleoside
  modified_base 8: mod_base = OTHER; note = 2'-O-methyl modified nucleoside
  modified_base 9: mod_base = OTHER; note = 2'-fluoro-modified nucleoside
  modified_base 10: mod_base = OTHER; note = 2'-O-methyl modified nucleoside
  modified_base 11: mod_base = OTHER; note = 2'-fluoro-modified nucleoside
  modified_base 12: mod_base = OTHER; note = 2'-O-methyl modified nucleoside
  modified_base 13: mod_base = OTHER; note = 2'-O-methyl modified nucleoside
  modified_base 14: mod_base = OTHER; note = 2'-O-methyl modified nucleoside
  modified_base 15: mod_base = OTHER; note = 2'-O-methyl modified nucleoside
  modified_base 16: mod_base = OTHER; note = 2'-O-methyl modified nucleoside
  modified_base 17: mod_base = OTHER; note = 2'-O-methyl modified nucleoside
  modified_base 18: mod_base = OTHER; note = 2'-O-methyl modified nucleoside
  modified_base 19: mod_base = OTHER; note = 2'-O-methyl modified nucleoside with phosphorothioate linkage
  modified_base 20: mod_base = OTHER; note = 2'-O-methyl modified nucleoside with phosphorothioate linkage
  modified_base 21: mod_base = OTHER; note = 2'-O-methyl modified nucleoside
aacagaaagaaatgttgcatt

SEQ ID NO: 12858 - RNA, 21 nt, synthetic construct
  source 1..21: mol_type = other RNA
  modified_base 1: mod_base = OTHER; note = 2'-O-methyl modified nucleoside with phosphorothioate linkage
  modified_base 2: mod_base = OTHER; note = 2'-O-methyl modified nucleoside with phosphorothioate linkage
  modified_base 3: mod_base = OTHER; note = 2'-O-methyl modified nucleoside
  modified_base 4: mod_base = OTHER; note = 2'-O-methyl modified nucleoside
  modified_base 5: mod_base = OTHER; note = 2'-fluoro-modified nucleoside
  modified_base 6: mod_base = OTHER; note = 2'-O-methyl modified nucleoside
  modified_base 7: mod_base = OTHER; note = 2'-fluoro-modified nucleoside
  modified_base 8: mod_base = OTHER; note = 2'-O-methyl modified nucleoside
  modified_base 9: mod_base = OTHER; note = 2'-fluoro-modified nucleoside
  modified_base 10: mod_base = OTHER; note = 2'-fluoro-modified nucleoside
  modified_base 11: mod_base = OTHER; note = 2'-O-methyl modified nucleoside
  modified_base 12: mod_base = OTHER; note = 2'-O-methyl modified nucleoside
  modified_base 13: mod_base = OTHER; note = 2'-O-methyl modified nucleoside
  modified_base 14: mod_base = OTHER; note = 2'-O-methyl modified nucleoside
  modified_base 15: mod_base = OTHER; note = 2'-O-methyl modified nucleoside
  modified_base 16: mod_base = OTHER; note = 2'-O-methyl modified nucleoside
  modified_base 17: mod_base = OTHER; note = 2'-O-methyl modified nucleoside
  modified_base 18: mod_base = OTHER; note = 2'-O-methyl modified nucleoside
  modified_base 19: mod_base = OTHER; note = 2'-O-methyl modified nucleoside with phosphorothioate linkage
  modified_base 20: mod_base = OTHER; note = 2'-O-methyl modified nucleoside with phosphorothioate linkage
  modified_base 21: mod_base = OTHER; note = 2'-O-methyl modified nucleoside
aacagaaagaaatgttgcatt

SEQ ID NO: 12859 - RNA, 21 nt, synthetic construct
  source 1..21: mol_type = other RNA
  modified_base 1: mod_base = OTHER; note = 2'-O-methyl modified nucleoside with phosphorothioate linkage
  modified_base 2: mod_base = OTHER; note = 2'-O-methyl modified nucleoside with phosphorothioate linkage
  modified_base 3: mod_base = OTHER; note = 2'-O-methyl modified nucleoside
  modified_base 4: mod_base = OTHER; note = 2'-O-methyl modified nucleoside
  modified_base 5: mod_base = OTHER; note = 2'-fluoro-modified nucleoside
  modified_base 6: mod_base = OTHER; note = 2'-O-methyl modified nucleoside
  modified_base 7: mod_base = OTHER; note = 2'-fluoro-modified nucleoside
  modified_base 8: mod_base = OTHER; note = 2'-fluoro-modified nucleoside
  modified_base 9: mod_base = OTHER; note = 2'-fluoro-modified nucleoside
  modified_base 10: mod_base = OTHER; note = 2'-fluoro-modified nucleoside
  modified_base 11: mod_base = OTHER; note = 2'-O-methyl modified nucleoside
  modified_base 12: mod_base = OTHER; note = 2'-O-methyl modified nucleoside
  modified_base 13: mod_base = OTHER; note = 2'-O-methyl modified nucleoside
  modified_base 14: mod_base = OTHER; note = 2'-O-methyl modified nucleoside
  modified_base 15: mod_base = OTHER; note = 2'-O-methyl modified nucleoside
  modified_base 16: mod_base = OTHER; note = 2'-O-methyl modified nucleoside
  modified_base 17: mod_base = OTHER; note = 2'-O-methyl modified nucleoside
  modified_base 18: mod_base = OTHER; note = 2'-O-methyl modified nucleoside
  modified_base 19: mod_base = OTHER; note = 2'-O-methyl modified nucleoside with phosphorothioate linkage
  modified_base 20: mod_base = OTHER; note = 2'-O-methyl modified nucleoside with phosphorothioate linkage
  modified_base 21: mod_base = OTHER; note = 2'-O-methyl modified nucleoside
aacagaaagaaatgttgcatt

SEQ ID NO: 12860 - RNA, 21 nt, synthetic construct
  source 1..21: mol_type = other RNA
  modified_base 1: mod_base = OTHER; note = 2'-O-methyl modified nucleoside with phosphorothioate linkage
  modified_base 2: mod_base = OTHER; note = 2'-O-methyl modified nucleoside with phosphorothioate linkage
  modified_base 3: mod_base = OTHER; note = 2'-O-methyl modified nucleoside
  modified_base 4: mod_base = OTHER; note = 2'-O-methyl modified nucleoside
  modified_base 5: mod_base = OTHER; note = 2'-fluoro-modified nucleoside
  modified_base 6: mod_base = OTHER; note = 2'-fluoro-modified nucleoside
  modified_base 7: mod_base = OTHER; note = 2'-O-methyl modified nucleoside
  modified_base 8: mod_base = OTHER; note = 2'-O-methyl modified nucleoside
  modified_base 9: mod_base = OTHER; note = 2'-fluoro-modified nucleoside
  modified_base 10: mod_base = OTHER; note = 2'-O-methyl modified nucleoside
  modified_base 11: mod_base = OTHER; note = 2'-O-methyl modified nucleoside
  modified_base 12: mod_base = OTHER; note = 2'-O-methyl modified nucleoside
  modified_base 13: mod_base = OTHER; note = 2'-O-methyl modified nucleoside
  modified_base 14: mod_base = OTHER; note = 2'-O-methyl modified nucleoside
  modified_base 15: mod_base = OTHER; note = 2'-O-methyl modified nucleoside
  modified_base 16: mod_base = OTHER; note = 2'-O-methyl modified nucleoside
  modified_base 17: mod_base = OTHER; note = 2'-O-methyl modified nucleoside
  modified_base 18: mod_base = OTHER; note = 2'-O-methyl modified nucleoside
  modified_base 19: mod_base = OTHER; note = 2'-O-methyl modified nucleoside with phosphorothioate linkage
  modified_base 20: mod_base = OTHER; note = 2'-O-methyl modified nucleoside with phosphorothioate linkage
  modified_base 21: mod_base = OTHER; note = 2'-O-methyl modified nucleoside
aacagaaagaaatgttgcatt

SEQ ID NO: 12861 - RNA, 21 nt, synthetic construct
  source 1..21: mol_type = other RNA
  modified_base 1: mod_base = OTHER; note = 2'-O-methyl modified nucleoside with phosphorothioate linkage
  modified_base 2: mod_base = OTHER; note = 2'-O-methyl modified nucleoside with phosphorothioate linkage
  modified_base 3: mod_base = OTHER; note = 2'-O-methyl modified nucleoside
  modified_base 4: mod_base = OTHER; note = 2'-O-methyl modified nucleoside
  modified_base 5: mod_base = OTHER; note = 2'-fluoro-modified nucleoside
  modified_base 6: mod_base = OTHER; note = 2'-fluoro-modified nucleoside
  modified_base 7: mod_base = OTHER; note = 2'-O-methyl modified nucleoside
  modified_base 8: mod_base = OTHER; note = 2'-O-methyl modified nucleoside
  modified_base 9: mod_base = OTHER; note = 2'-fluoro-modified nucleoside
  modified_base 10: mod_base = OTHER; note = 2'-O-methyl modified nucleoside
  modified_base 11: mod_base = OTHER; note = 2'-fluoro-modified nucleoside
  modified_base 12: mod_base = OTHER; note = 2'-O-methyl modified nucleoside
  modified_base 13: mod_base = OTHER; note = 2'-O-methyl modified nucleoside
  modified_base 14: mod_base = OTHER; note = 2'-O-methyl modified nucleoside
  modified_base 15: mod_base = OTHER; note = 2'-O-methyl modified nucleoside
  modified_base 16: mod_base = OTHER; note = 2'-O-methyl modified nucleoside
  modified_base 17: mod_base = OTHER; note = 2'-O-methyl modified nucleoside
  modified_base 18: mod_base = OTHER; note = 2'-O-methyl modified nucleoside
  modified_base 19: mod_base = OTHER; note = 2'-O-methyl modified nucleoside with phosphorothioate linkage
  modified_base 20: mod_base = OTHER; note = 2'-O-methyl modified nucleoside with phosphorothioate linkage
  modified_base 21: mod_base = OTHER; note = 2'-O-methyl modified nucleoside
aacagaaagaaatgttgcatt

SEQ ID NO: 12862 - RNA, 21 nt, synthetic construct
  source 1..21: mol_type = other RNA
  modified_base 1: mod_base = OTHER; note = 2'-O-methyl modified nucleoside with phosphorothioate linkage
  modified_base 2: mod_base = OTHER; note = 2'-O-methyl modified nucleoside with phosphorothioate linkage
  modified_base 3: mod_base = OTHER; note = 2'-O-methyl modified nucleoside
  modified_base 4: mod_base = OTHER; note = 2'-O-methyl modified nucleoside
  modified_base 5: mod_base = OTHER; note = 2'-fluoro-modified nucleoside
  modified_base 6: mod_base = OTHER; note = 2'-fluoro-modified nucleoside
  modified_base 7: mod_base = OTHER; note = 2'-O-methyl modified nucleoside
  modified_base 8: mod_base = OTHER; note = 2'-O-methyl modified nucleoside
  modified_base 9: mod_base = OTHER; note = 2'-fluoro-modified nucleoside
  modified_base 10: mod_base = OTHER; note = 2'-fluoro-modified nucleoside
  modified_base 11: mod_base = OTHER; note = 2'-O-methyl modified nucleoside
  modified_base 12: mod_base = OTHER; note = 2'-O-methyl modified nucleoside
  modified_base 13: mod_base = OTHER; note = 2'-O-methyl modified nucleoside
  modified_base 14: mod_base = OTHER; note = 2'-O-methyl modified nucleoside
  modified_base 15: mod_base = OTHER; note = 2'-O-methyl modified nucleoside
  modified_base 16: mod_base = OTHER; note = 2'-O-methyl modified nucleoside
  modified_base 17: mod_base = OTHER; note = 2'-O-methyl modified nucleoside
  modified_base 18: mod_base = OTHER; note = 2'-O-methyl modified nucleoside
  modified_base 19: mod_base = OTHER; note = 2'-O-methyl modified nucleoside with phosphorothioate linkage
  modified_base 20: mod_base = OTHER; note = 2'-O-methyl modified nucleoside with phosphorothioate linkage
  modified_base 21: mod_base = OTHER; note = 2'-O-methyl modified nucleoside
aacagaaagaaatgttgcatt

SEQ ID NO: 12863 - RNA, 21 nt, synthetic construct
  source 1..21: mol_type = other RNA
  modified_base 1: mod_base = OTHER; note = 2'-O-methyl modified nucleoside with phosphorothioate linkage
  modified_base 2: mod_base = OTHER; note = 2'-O-methyl modified nucleoside with phosphorothioate linkage
  modified_base 3: mod_base = OTHER; note = 2'-O-methyl modified nucleoside
  modified_base 4: mod_base = OTHER; note = 2'-O-methyl modified nucleoside
  modified_base 5: mod_base = OTHER; note = 2'-fluoro-modified nucleoside
  modified_base 6: mod_base = OTHER; note = 2'-fluoro-modified nucleoside
  modified_base 7: mod_base = OTHER; note = 2'-O-methyl modified nucleoside
  modified_base 8: mod_base = OTHER; note = 2'-fluoro-modified nucleoside
  modified_base 9: mod_base = OTHER; note = 2'-fluoro-modified nucleoside
  modified_base 10: mod_base = OTHER; note = 2'-O-methyl modified nucleoside
  modified_base 11: mod_base = OTHER; note = 2'-O-methyl modified nucleoside
  modified_base 12: mod_base = OTHER; note = 2'-O-methyl modified nucleoside
  modified_base 13: mod_base = OTHER; note = 2'-O-methyl modified nucleoside
  modified_base 14: mod_base = OTHER; note = 2'-O-methyl modified nucleoside
  modified_base 15: mod_base = OTHER; note = 2'-O-methyl modified nucleoside
  modified_base 16: mod_base = OTHER; note = 2'-O-methyl modified nucleoside
  modified_base 17: mod_base = OTHER; note = 2'-O-methyl modified nucleoside
  modified_base 18: mod_base = OTHER; note = 2'-O-methyl modified nucleoside
  modified_base 19: mod_base = OTHER; note = 2'-O-methyl modified nucleoside with phosphorothioate linkage
  modified_base 20: mod_base = OTHER; note = 2'-O-methyl modified nucleoside with phosphorothioate linkage
  modified_base 21: mod_base = OTHER; note = 2'-O-methyl modified nucleoside
aacagaaagaaatgttgcatt

SEQ ID NO: 12864 - RNA, 21 nt, synthetic construct
  source 1..21: mol_type = other RNA
  modified_base 1: mod_base = OTHER; note = 2'-O-methyl modified nucleoside with phosphorothioate linkage
  modified_base 2: mod_base = OTHER; note = 2'-O-methyl modified nucleoside with phosphorothioate linkage
  modified_base 3: mod_base = OTHER; note = 2'-O-methyl modified nucleoside
  modified_base 4: mod_base = OTHER; note = 2'-O-methyl modified nucleoside
  modified_base 5: mod_base = OTHER; note = 2'-fluoro-modified nucleoside
  modified_base 6: mod_base = OTHER; note = 2'-fluoro-modified nucleoside
  modified_base 7: mod_base = OTHER; note = 2'-fluoro-modified nucleoside
  modified_base 8: mod_base = OTHER; note = 2'-fluoro-modified nucleoside
  modified_base 9: mod_base = OTHER; note = 2'-fluoro-modified nucleoside
  modified_base 10: mod_base = OTHER; note = 2'-O-methyl modified nucleoside
  modified_base 11: mod_base = OTHER; note = 2'-O-methyl modified nucleoside
  modified_base 12: mod_base = OTHER; note = 2'-O-methyl modified nucleoside
  modified_base 13: mod_base = OTHER; note = 2'-O-methyl modified nucleoside
  modified_base 14: mod_base = OTHER; note = 2'-O-methyl modified nucleoside
  modified_base 15: mod_base = OTHER; note = 2'-O-methyl modified nucleoside
  modified_base 16: mod_base = OTHER; note = 2'-O-methyl modified nucleoside
  modified_base 17: mod_base = OTHER; note = 2'-O-methyl modified nucleoside
  modified_base 18: mod_base = OTHER; note = 2'-O-methyl modified nucleoside
  modified_base 19: mod_base = OTHER; note = 2'-O-methyl modified nucleoside with phosphorothioate linkage
  modified_base 20: mod_base = OTHER; note = 2'-O-methyl modified nucleoside with phosphorothioate linkage
  modified_base 21: mod_base = OTHER; note = 2'-O-methyl modified nucleoside
aacagaaagaaatgttgcatt

SEQ ID NO: 12865 - RNA, 21 nt, synthetic construct
  source 1..21: mol_type = other RNA
  modified_base 1: mod_base = OTHER; note = 2'-O-methyl modified nucleoside with phosphorothioate linkage
  modified_base 2: mod_base = OTHER; note = 2'-O-methyl modified nucleoside with phosphorothioate linkage
  modified_base 3: mod_base = OTHER; note = 2'-O-methyl modified nucleoside
  modified_base 4: mod_base = OTHER; note = 2'-O-methyl modified nucleoside
  modified_base 5: mod_base = OTHER; note = 2'-O-methyl modified nucleoside
  modified_base 6: mod_base = OTHER; note = 2'-fluoro-modified nucleoside
  modified_base 7: mod_base = OTHER; note = 2'-O-methyl modified nucleoside
  modified_base 8: mod_base = OTHER; note = 2'-fluoro-modified nucleoside
  modified_base 9: mod_base = OTHER; note = 2'-fluoro-modified nucleoside
  modified_base 10: mod_base = OTHER; note = 2'-O-methyl modified nucleoside
  modified_base 11: mod_base = OTHER; note = 2'-O-methyl modified nucleoside
  modified_base 12: mod_base = OTHER; note = 2'-O-methyl modified nucleoside
  modified_base 13: mod_base = OTHER; note = 2'-O-methyl modified nucleoside
  modified_base 14: mod_base = OTHER; note = 2'-O-methyl modified nucleoside
  modified_base 15: mod_base = OTHER; note = 2'-O-methyl modified nucleoside
  modified_base 16: mod_base = OTHER; note = 2'-O-methyl modified nucleoside
  modified_base 17: mod_base = OTHER; note = 2'-O-methyl modified nucleoside
  modified_base 18: mod_base = OTHER; note = 2'-O-methyl modified nucleoside
  modified_base 19: mod_base = OTHER; note = 2'-O-methyl modified nucleoside with phosphorothioate linkage
  modified_base 20: mod_base = OTHER; note = 2'-O-methyl modified nucleoside with phosphorothioate linkage
  modified_base 21: mod_base = OTHER; note = 2'-O-methyl modified nucleoside
atatattctgagttttgtatt

SEQ ID NO: 12866 - RNA, 21 nt, synthetic construct
  source 1..21: mol_type = other RNA
  modified_base 1: mod_base = OTHER; note = 2'-O-methyl modified nucleoside with phosphorothioate linkage
  modified_base 2: mod_base = OTHER; note = 2'-O-methyl modified nucleoside with phosphorothioate linkage
  modified_base 3: mod_base = OTHER; note = 2'-O-methyl modified nucleoside
  modified_base 4: mod_base = OTHER; note = 2'-O-methyl modified nucleoside
  modified_base 5: mod_base = OTHER; note = 2'-O-methyl modified nucleoside
  modified_base 6: mod_base = OTHER; note = 2'-fluoro-modified nucleoside
  modified_base 7: mod_base = OTHER; note = 2'-fluoro-modified nucleoside
  modified_base 8: mod_base = OTHER; note = 2'-O-methyl modified nucleoside
  modified_base 9: mod_base = OTHER; note = 2'-fluoro-modified nucleoside
  modified_base 10: mod_base = OTHER; note = 2'-O-methyl modified nucleoside
  modified_base 11: mod_base = OTHER; note = 2'-O-methyl modified nucleoside
  modified_base 12: mod_base = OTHER; note = 2'-O-methyl modified nucleoside
  modified_base 13: mod_base = OTHER; note = 2'-O-methyl modified nucleoside
  modified_base 14: mod_base = OTHER; note = 2'-O-methyl modified nucleoside
  modified_base 15: mod_base = OTHER; note = 2'-O-methyl modified nucleoside
  modified_base 16: mod_base = OTHER; note = 2'-O-methyl modified nucleoside
  modified_base 17: mod_base = OTHER; note = 2'-O-methyl modified nucleoside
  modified_base 18: mod_base = OTHER; note = 2'-O-methyl modified nucleoside
  modified_base 19: mod_base = OTHER; note = 2'-O-methyl modified nucleoside with phosphorothioate linkage
  modified_base 20: mod_base = OTHER; note = 2'-O-methyl modified nucleoside with phosphorothioate linkage
  modified_base 21: mod_base = OTHER; note = 2'-O-methyl modified nucleoside
atatattctgagttttgtatt

SEQ ID NO: 12867 - RNA, 6372 nt, Homo sapiens
  source 1..6372: mol_type = genomic RNA
gcgccactgcagctggcattggccgggactggaagtgcgggcttctgcagcagccgaagctggagctgctagggcagcagcggctcccctgttgtatggacattctgcacccgaaactgatagctgagtcctgaagttttatgttatgaaacagaagaactttcatcccagcacatgatttgggaattacactttgtgacatggatgaatctgcactgacccttggtacaatagatgtttcttatctgccacattcatcagaatacagtgttggtcgatgtaagcacacaagtgaggaatggggtgagtgtggctttagacccaccatcttcagatctgcaactttaaaatggaaagaaagcctaatgagtcggaaaaggccatttgttggaagatgttgttactcctgcactccccagagctgggacaaatttttcaaccccagtatcccgtctttgggtttgcggaatgttatttatatcaatgaaactcacacaagacaccgcggatggcttgcaagacgcctttcttacgttctttttattcaagagcgagatgtgcataagggcatgtttgccaccaatgtgactgaaaatgtgctgaacagcagtagagtacaagaggcaattgcagaagtggctgctgaattaaaccctgatggttctgcccagcagcaatcaaaagccgttaacaaagtgaaaaagaaagctaaaaggattcttcaagaaatggttgccactgtctcaccggcaatgatcagactgactgggtgggtgctgctaaaactgttcaacagcttcttttggaacattcaaattcacaaaggtcaacttgagatggttaaagctgcaactgagacgaatttgccgcttctgtttctaccagttcatagatcccatattgactatctgctgctcactttcattctcttctgccataacatcaaagcaccatacattgcttcaggcaataatctcaacatcccaatcttcagtaccttgatccataagcttgggggcttcttcatacgacgaaggctcgatgaaacaccagatggacggaaagatgttctctatagagctttgctccatgggcatatagttgaattacttcgacagcagcaattcttggagatcttcctggaaggcacacgttctaggagtggaaaaacctcttgtgctcgggcaggacttttgtcagttgtggtagatactctgtctaccaatgtcatcccagacatcttgataatacctgttggaatctcctatgatcgcattatcgaaggtcactacaatggtgaacaactgggcaaacctaagaagaatgagagcctgtggagtgtagcaagaggtgttattagaatgttacgaaaaaactatggttgtgtccgagtggattttgcacagccattttccttaaaggaatatttagaaagccaaagtcagaaaccggtgtctgctctactttccctggagcaagcgttgttaccagctatacttccttcaagacccagtgatgctgctgatgaaggtagagacacgtccattaatgagtccagaaatgcaacagatgaatccctacgaaggaggttgattgcaaatctggctgagcatattctattcactgctagcaagtcctgtgccattatgtccacacacattgtggcttgcctgctcctctacagacacaggcagggaattgatctctccacattggtcgaagacttctttgtgatgaaagaggaagtcctggctcgtgattttgacctggggttctcaggaaattcagaagatgtagtaatgcatgccatacagctgctgggaaattgtgtcacaatcacccacactagcaggaacgatgagttttttatcacccccagcacaactgtcccatcagtcttcgaactcaacttctacagcaatggggtacttcatgtctttatcatggaggccatcatagcttgcagcctttatgcagttctgaacaagaggggactggggggtcccactagcaccccacctaacctgatcagccaggagcagctggtgcggaaggcggccagcctgtgctaccttctctccaatgaaggcaccatctcactgccttgccagacattttaccaagtctgccatgaaacagtaggaaagtttatccagtatggcattcttacagtggcagagcacgatgaccaggaagatatcagtcctagtcttgctgagcagcagtgggacaagaagcttccagaacctttgtcttggagaagtgatgaagaagatgaagacagtgactttggggaggaacagcgagattgctacctgaaggtgagccaatccaaggagcaccagcagtttatcaccttcttacagagactccttgggcctttgctggaggcctacagctctgctgccatctttgttcacaacttcagtggtcctgttccagaacctgagtatctgcaaaagttgcacaaatacctaataaccagaacagaaagaaatgttgcagtatatgctgagagtgccacatattgtcttgtgaagaatgctgtgaaaatgtttaaggatattggggttttcaaggagaccaaacaaaagagagtgtctgttttagaactgagcagcacttttctacctcaatgcaaccgacaaaaacttctagaatatattctgagttttgtggtgctgtaggtaacgtgtggcactgctggcaaatgaaggtcatgagatgagttccttgtaggtaccagcttctggctcaagagttgaaggtgccatcgcagggtcaggcctgccctgtcccgaagtgatctcctggaagacaagtgccttctccctccatggatctgtgatcttcccagctctgcatcaacacagcagcctgcagataacacttggggggacctcagcctctattcgcaactcataatccgtagactacaagatgaaatctcaataaattatttttgagtttattaaagattgacattttaagtacaacttttaaggactaattactgtgatggacacagaaatgtagctgtgttctggaactgaatcttacatggtatacttagtgctgctgggtaatttgttggtatattatctggttagtggttaatgcttcctttaaaaataattgagtcatccattcactctttttcagttttatctgtcaatagtagctacatttttaatgggagcaccttttatcccaaagtgctttataaattgagtggactgatatatatcacacccaggtatcactgtgctgtcctttgctgtcagatttagaaatgtttttaagagctatgtgaaaacagacaatattagtttaggtcgggaactgagatattgtaatcaaatagttaacatcaggaagttaatttggctggcaaaattctagggaaacttggccagaaaactggtgttgaaggcttttgctcatataaacaagtgccattgagtttcaaatgaccagcaaatatatttagaacccttcctgttttatgtctgtacctcgtccacccctcaggtaatacctgcctctcacaggtacagctgtttcttggaaatcctccaaccaaatagcagttttcctaacttgattagcttgagctgacagactgttagaatacagttctctggccacagctgatgagggctttctgtactgcacacagattgtgtactgcaccccagtccaggtgactggtacccactcgagttgtgccgtgcacaacctgtccagtatatgcatgtggtggccctactgactggtaatggttagaggcatttatggatttttagctttgaggaaaaaccatgacttttaacaaatttttatgggttatatgcctaaacccttatgccacatagtggtaaataattatgaaaaatggtctgttcataattggtaggtgccttttgtgagcagggagcataattattggtttattatggtaattatggtgattttttaaatatcatgtaatgttaaaacgttttctaacagtttactgttgcttatctccaagatattatggaattaagaatttttccagatgagtgttacatagattctttgaatttagtataaaagtactgagaattaagtttgtacttccataagcttggattttaaacactgatagtatctcatgagtaatgtgtgttttgggagagggagggatgctgattgatatttcacattgtatgaaataccatgtttgaaactcatagcaataatgctatgctgttgtgatccctctcaagttctgcatttaaaatatattttttctttataggaattgatgtataccatgaagtcattgtcagttgtagtagctctgatgttgaatgagatatcatgttttagcattccattttactgactagggtagaagaacacttttcttggctacatttggaggatacccagggagtcttgggtgttccttatctggggaagcaaacatttcactagtctctttttttcatcctttaaattgtaaattaaggattactcaagctcaccattattcaagattgggactcgcttcccagtcgacactctgccctgcctgtcattgctgcaaagagctgctgctttgccaacctaagcaaagaaaatacggcttctcttgcattattttcccttttggttggtttgttttctagaagtacgttcagatgctttggggaatgcaatgtatgatttgctagctctctcaccacttaactcactgtgaggataaatatgcatgctttttgtaattaactggtgctttgaaaatcttttttaagggagaaaaatctcaaccaaagttatgctcatccagacaagctgacctttgagttaatttcagcacaactcattcttcagtgcctcatgactgaaaacaaaaaacaaaaaaacgaaagcatcttcacaatgaagcttccagatagcaccgttttgctaaaagatacattctcattgttttccaacagtgatggcttccacataaggttaaacaaactaggtgcttgtaaataatttattacagtttactctatcgcatttctgtaacatgaaatgcatgcccttcttcaggggaagactgtggtcaagttaaaaaaaaaaaacaatattaaacaacatgaaactgcagtctgtttttgaaaatgagaatgtcctaagtgattcagaagagaggagggaagttgtgcactctgaaaatgcatgaaaaacaaaggcaaaaactagtgggaaatgtgtagaactgttaactgagatggcttcgagtcttccttctggaatctgttaaatttcacaaagtcatgagggtaaatggagaaaatatttctgggattacaatgaatgtaagcccaaattgtggaattgccagtaacctggatggggaaaagcatttcccatagcactccatgtaatatgagtgctctgtgagatgttcatcagtgttttatagaaatggtgttgctgggaaaccaagtttgcacctggaaacttacaatgcactttagcgcagtaagggcttggcatccggtagtgaaaaactgtctaacccagcattgcccaaactattttgacaccaggacctttttctcctttgggatacttatgaacctctcactaatgtcctgtggagaacattttgggaaacactatgttagatagttctttaaggagacaaaacggtaatgaacagatagcactggggcagaatatgcatgcattttgtaacgtccagtgtggcgttgaatagatgtgtatttcctcccctgcagaaaataagcacagaaaattataatgtaggtgatcggagctctttcctttgatagagagaacagccccaatgatcctggctttttcactgaacgtatcagaatacatggatgaattggggtaaataaggttttaattcagatctagaagaaagtattgtacgtttgaatgcagatttttatccacagatagttgtagtgtttagacatgacaggacctatcgttgaggtttctaagacttactatgggctgtaaacctgttttttaaaactattttagaaacctgagacttgccgtctggcattttagtttaatacaaactaatgattgcatttgaaagagattcttgaccttatttctaaacgtctagagctctgaaatgtcttgatggaaggtattaaactatttgcctgttgtacaaagaaatgttaagactcgtgaaaagaattactataaggtactgtgaaataactgcgattttgtgagcaaaacatacttggaaatgctgattgatttttatgcttgttagtgtattgcaagaaacacagaaaatgtagttttgttttaataaaccaaaaattgaacata

SEQ ID NO: 12868 - RNA, 21 nt, synthetic construct
  source 1..21: mol_type = other RNA
  misc_feature 1: note = ETL17 moiety with a phosphorothioate linkage
  modified_base 1: mod_base = OTHER; note = 2'-O-methyl modified nucleoside
  modified_base 2: mod_base = OTHER; note = 2'-O-methyl modified nucleoside
  modified_base 3: mod_base = OTHER; note = 2'-O-methyl modified nucleoside
  modified_base 4: mod_base = OTHER; note = 2'-O-methyl modified nucleoside
  modified_base 5: mod_base = OTHER; note = 2'-fluoro-modified nucleoside
  modified_base 6: mod_base = OTHER; note = 2'-fluoro-modified nucleoside
  modified_base 7: mod_base = OTHER; note = 2'-O-methyl modified nucleoside
  modified_base 8: mod_base = OTHER; note = 2'-O-methyl modified nucleoside
  modified_base 9: mod_base = OTHER; note = 2'-fluoro-modified nucleoside
  modified_base 10: mod_base = OTHER; note = 2'-O-methyl modified nucleoside
  modified_base 11: mod_base = OTHER; note = 2'-fluoro-modified nucleoside
  modified_base 12: mod_base = OTHER; note = 2'-O-methyl modified nucleoside
  modified_base 13: mod_base = OTHER; note = 2'-O-methyl modified nucleoside
  modified_base 14: mod_base = OTHER; note = 2'-O-methyl modified nucleoside
  modified_base 15: mod_base = OTHER; note = 2'-O-methyl modified nucleoside
  modified_base 16: mod_base = OTHER; note = 2'-O-methyl modified nucleoside
  modified_base 17: mod_base = OTHER; note = 2'-O-methyl modified nucleoside
  modified_base 18: mod_base = OTHER; note = 2'-O-methyl modified nucleoside
  modified_base 19: mod_base = OTHER; note = 2'-O-methyl modified nucleoside with phosphorothioate linkage
  modified_base 20: mod_base = OTHER; note = 2'-O-methyl modified nucleoside with phosphorothioate linkage
  modified_base 21: mod_base = OTHER; note = 2'-O-methyl modified nucleoside
atcagaatacagtgttggatt

SEQ ID NO: 12869 - RNA, 21 nt, synthetic construct
  source 1..21: mol_type = other RNA
  misc_feature 1: note = ETL17 moiety with a phosphorothioate linkage
  modified_base 1: mod_base = OTHER; note = 2'-O-methyl modified nucleoside
  modified_base 2: mod_base = OTHER; note = 2'-O-methyl modified nucleoside
  modified_base 3: mod_base = OTHER; note = 2'-O-methyl modified nucleoside
  modified_base 4: mod_base = OTHER; note = 2'-O-methyl modified nucleoside
  modified_base 5: mod_base = OTHER; note = 2'-O-methyl modified nucleoside
  modified_base 6: mod_base = OTHER; note = 2'-fluoro-modified nucleoside
  modified_base 7: mod_base = OTHER; note = 2'-O-methyl modified nucleoside
  modified_base 8: mod_base = OTHER; note = 2'-O-methyl modified nucleoside
  modified_base 9: mod_base = OTHER; note = 2'-fluoro-modified nucleoside
  modified_base 10: mod_base = OTHER; note = 2'-O-methyl modified nucleoside
  modified_base 11: mod_base = OTHER; note = 2'-fluoro-modified nucleoside
  modified_base 12: mod_base = OTHER; note = 2'-O-methyl modified nucleoside
  modified_base 13: mod_base = OTHER; note = 2'-O-methyl modified nucleoside
  modified_base 14: mod_base = OTHER; note = 2'-O-methyl modified nucleoside
  modified_base 15: mod_base = OTHER; note = 2'-O-methyl modified nucleoside
  modified_base 16: mod_base = OTHER; note = 2'-O-methyl modified nucleoside
  modified_base 17: mod_base = OTHER; note = 2'-O-methyl modified nucleoside
  modified_base 18: mod_base = OTHER; note = 2'-O-methyl modified nucleoside
  modified_base 19: mod_base = OTHER; note = 2'-O-methyl modified nucleoside with phosphorothioate linkage
  modified_base 20: mod_base = OTHER; note = 2'-O-methyl modified nucleoside with phosphorothioate linkage
  modified_base 21: mod_base = OTHER; note = 2'-O-methyl modified nucleoside
gaatacagtgttggtcgaatt

SEQ ID NO: 12870 - DNA, 21 bp, synthetic construct
  source 1..21: mol_type = other DNA
  misc_feature 1: note = ETL17 moiety with a phosphorothioate linkage
  modified_base 1: mod_base = OTHER; note = 2'-O-methyl modified nucleoside
  modified_base 2: mod_base = OTHER; note = 2'-O-methyl modified nucleoside
  modified_base 3: mod_base = OTHER; note = 2'-O-methyl modified nucleoside
  modified_base 4: mod_base = OTHER; note = 2'-O-methyl modified nucleoside
  modified_base 5: mod_base = OTHER; note = 2'-O-methyl modified nucleoside
  modified_base 6: mod_base = OTHER; note = 2'-fluoro-modified nucleoside
  modified_base 7: mod_base = OTHER; note = 2'-fluoro-modified nucleoside
  modified_base 8: mod_base = OTHER; note = 2'-fluoro-modified nucleoside
  modified_base 10: mod_base = OTHER; note = 2'-O-methyl modified nucleoside
  modified_base 11: mod_base = OTHER; note = 2'-O-methyl modified nucleoside
  modified_base 12: mod_base = OTHER; note = 2'-O-methyl modified nucleoside
  modified_base 13: mod_base = OTHER; note = 2'-O-methyl modified nucleoside
  modified_base 14: mod_base = OTHER; note = 2'-O-methyl modified nucleoside
  modified_base 15: mod_base = OTHER; note = 2'-O-methyl modified nucleoside
  modified_base 16: mod_base = OTHER; note = 2'-O-methyl modified nucleoside
  modified_base 17: mod_base = OTHER; note = 2'-O-methyl modified nucleoside
  modified_base 18: mod_base = OTHER; note = 2'-O-methyl modified nucleoside
  modified_base 19: mod_base = OTHER; note = 2'-O-methyl modified nucleoside with phosphorothioate linkage
  modified_base 20: mod_base = OTHER; note = 2'-O-methyl modified nucleoside with phosphorothioate linkage
  modified_base 21: mod_base = OTHER; note = 2'-O-methyl modified nucleoside
  misc_feature 1..8: note = RNA
  misc_feature 9: note = DNA
  misc_feature 10..21: note = RNA
ctttgggtttgcggaatgatt

SEQ ID NO: 12871 - RNA, 21 nt, synthetic construct
  source 1..21: mol_type = other RNA
  misc_feature 1: note = ETL17 moiety with a phosphorothioate linkage
  modified_base 1: mod_base = OTHER; note = 2'-O-methyl modified nucleoside
  modified_base 2: mod_base = OTHER; note = 2'-O-methyl modified nucleoside
  modified_base 3: mod_base = OTHER; note = 2'-O-methyl modified nucleoside
  modified_base 4: mod_base = OTHER; note = 2'-O-methyl modified nucleoside
  modified_base 5: mod_base = OTHER; note = 2'-fluoro-modified nucleoside
  modified_base 6: mod_base = OTHER; note = 2'-fluoro-modified nucleoside
  modified_base 7: mod_base = OTHER; note = 2'-O-methyl modified nucleoside
  modified_base 8: mod_base = OTHER; note = 2'-O-methyl modified nucleoside
  modified_base 9: mod_base = OTHER; note = 2'-fluoro-modified nucleoside
  modified_base 10: mod_base = OTHER; note = 2'-O-methyl modified nucleoside
  modified_base 11: mod_base = OTHER; note = 2'-fluoro-modified nucleoside
  modified_base 12: mod_base = OTHER; note = 2'-O-methyl modified nucleoside
  modified_base 13: mod_base = OTHER; note = 2'-O-methyl modified nucleoside
  modified_base 14: mod_base = OTHER; note = 2'-O-methyl modified nucleoside
  modified_base 15: mod_base = OTHER; note = 2'-O-methyl modified nucleoside
  modified_base 16: mod_base = OTHER; note = 2'-O-methyl modified nucleoside
  modified_base 17: mod_base = OTHER; note = 2'-O-methyl modified nucleoside
  modified_base 18: mod_base = OTHER; note = 2'-O-methyl modified nucleoside
  modified_base 19: mod_base = OTHER; note = 2'-O-methyl modified nucleoside with phosphorothioate linkage
  modified_base 20: mod_base = OTHER; note = 2'-O-methyl modified nucleoside with phosphorothioate linkage
  modified_base 21: mod_base = OTHER; note = 2'-O-methyl modified nucleoside
ataagggcatgtttgccaatt

SEQ ID NO: 12872 - RNA, 21 nt, synthetic construct
  source 1..21: mol_type = other RNA
  misc_feature 1: note = ETL17 moiety with a phosphorothioate linkage
  modified_base 1: mod_base = OTHER; note = 2'-O-methyl modified nucleoside
  modified_base 2: mod_base = OTHER; note = 2'-O-methyl modified nucleoside
  modified_base 3: mod_base = OTHER; note = 2'-O-methyl modified nucleoside
  modified_base 4: mod_base = OTHER; note = 2'-O-methyl modified nucleoside
  modified_base 5: mod_base = OTHER; note = 2'-O-methyl modified nucleoside
  modified_base 6: mod_base = OTHER; note = 2'-fluoro-modified nucleoside
  modified_base 7: mod_base = OTHER; note = 2'-O-methyl modified nucleoside
  modified_base 8: mod_base = OTHER; note = 2'-O-methyl modified nucleoside
  modified_base 9: mod_base = OTHER; note = 2'-fluoro-modified nucleoside
  modified_base 10: mod_base = OTHER; note = 2'-fluoro-modified nucleoside
  modified_base 11: mod_base = OTHER; note = 2'-O-methyl modified nucleoside
  modified_base 12: mod_base = OTHER; note = 2'-O-methyl modified nucleoside
  modified_base 13: mod_base = OTHER; note = 2'-O-methyl modified nucleoside
  modified_base 14: mod_base = OTHER; note = 2'-O-methyl modified nucleoside
  modified_base 15: mod_base = OTHER; note = 2'-O-methyl modified nucleoside
  modified_base 16: mod_base = OTHER; note = 2'-O-methyl modified nucleoside
  modified_base 17: mod_base = OTHER; note = 2'-O-methyl modified nucleoside
  modified_base 18: mod_base = OTHER; note = 2'-O-methyl modified nucleoside
  modified_base 19: mod_base = OTHER; note = 2'-O-methyl modified nucleoside with phosphorothioate linkage
  modified_base 20: mod_base = OTHER; note = 2'-O-methyl modified nucleoside with phosphorothioate linkage
  modified_base 21: mod_base = OTHER; note = 2'-O-methyl modified nucleoside
agctgcaactgagacgaaatt

SEQ ID NO: 12873 - RNA, 21 nt, synthetic construct
  source 1..21: mol_type = other RNA
  misc_feature 1: note = ETL17 moiety with a phosphorothioate linkage
  modified_base 1: mod_base = OTHER; note = 2'-O-methyl modified nucleoside
  modified_base 2: mod_base = OTHER; note = 2'-O-methyl modified nucleoside
  modified_base 3: mod_base = OTHER; note = 2'-O-methyl modified nucleoside
  modified_base 4: mod_base = OTHER; note = 2'-O-methyl modified nucleoside
  modified_base 5: mod_base = OTHER; note = 2'-fluoro-modified nucleoside
  modified_base 6: mod_base = OTHER; note = 2'-fluoro-modified nucleoside
  modified_base 7: mod_base = OTHER; note = 2'-O-methyl modified nucleoside
  modified_base 8: mod_base = OTHER; note = 2'-O-methyl modified nucleoside
  modified_base 9: mod_base = OTHER; note = 2'-fluoro-modified nucleoside
  modified_base 10: mod_base = OTHER; note = 2'-O-methyl modified nucleoside
  modified_base 11: mod_base = OTHER; note = 2'-fluoro-modified nucleoside
  modified_base 12: mod_base = OTHER; note = 2'-O-methyl modified nucleoside
  modified_base 13: mod_base = OTHER; note = 2'-O-methyl modified nucleoside
  modified_base 14: mod_base = OTHER; note = 2'-O-methyl modified nucleoside
  modified_base 15: mod_base = OTHER; note = 2'-O-methyl modified nucleoside
  modified_base 16: mod_base = OTHER; note = 2'-O-methyl modified nucleoside
  modified_base 17: mod_base = OTHER; note = 2'-O-methyl modified nucleoside
  modified_base 18: mod_base = OTHER; note = 2'-O-methyl modified nucleoside
  modified_base 19: mod_base = OTHER; note = 2'-O-methyl modified nucleoside with phosphorothioate linkage
  modified_base 20: mod_base = OTHER; note = 2'-O-methyl modified nucleoside with phosphorothioate linkage
  modified_base 21: mod_base = OTHER; note = 2'-O-methyl modified nucleoside
tctaccagttcatagatcatt

SEQ ID NO: 12874 - RNA, 21 nt, synthetic construct
  source 1..21: mol_type = other RNA
  misc_feature 1: note = ETL17 moiety with a phosphorothioate linkage
  modified_base 1: mod_base = OTHER; note = 2'-O-methyl modified nucleoside
  modified_base 2: mod_base = OTHER; note = 2'-O-methyl modified nucleoside
  modified_base 3: mod_base = OTHER; note = 2'-O-methyl modified nucleoside
  modified_base 4: mod_base = OTHER; note = 2'-O-methyl modified nucleoside
  modified_base 5: mod_base = OTHER; note = 2'-fluoro-modified nucleoside
  modified_base 6: mod_base = OTHER; note = 2'-O-methyl modified nucleoside
  modified_base 7: mod_base = OTHER; note = 2'-O-methyl modified nucleoside
  modified_base 8: mod_base = OTHER; note = 2'-fluoro-modified nucleoside
  modified_base 9: mod_base = OTHER; note = 2'-fluoro-modified nucleoside
  modified_base 10: mod_base = OTHER; note = 2'-O-methyl modified nucleoside
  modified_base 11: mod_base = OTHER; note = 2'-O-methyl modified nucleoside
  modified_base 12: mod_base = OTHER; note = 2'-O-methyl modified nucleoside
  modified_base 13: mod_base = OTHER; note = 2'-O-methyl modified nucleoside
  modified_base 14: mod_base = OTHER; note = 2'-O-methyl modified nucleoside
  modified_base 15: mod_base = OTHER; note = 2'-O-methyl modified nucleoside
  modified_base 16: mod_base = OTHER; note = 2'-O-methyl modified nucleoside
  modified_base 17: mod_base = OTHER; note = 2'-O-methyl modified nucleoside
  modified_base 18: mod_base = OTHER; note = 2'-O-methyl modified nucleoside
  modified_base 19: mod_base = OTHER; note = 2'-O-methyl modified nucleoside with phosphorothioate linkage
  modified_base 20: mod_base = OTHER; note = 2'-O-methyl modified nucleoside with phosphorothioate linkage
  modified_base 21: mod_base = OTHER; note = 2'-O-methyl modified nucleoside
ctaccagttcatagatccatt

SEQ ID NO: 12875 - RNA, 21 nt, synthetic construct
  source 1..21: mol_type = other RNA
  misc_feature 1: note = ETL17 moiety with a phosphorothioate linkage
  modified_base 1: mod_base = OTHER; note = 2'-O-methyl modified nucleoside
  modified_base 2: mod_base = OTHER; note = 2'-O-methyl modified nucleoside
  modified_base 3: mod_base = OTHER; note = 2'-O-methyl modified nucleoside
  modified_base 4: mod_base = OTHER; note = 2'-O-methyl modified nucleoside
  modified_base 5: mod_base = OTHER; note = 2'-fluoro-modified nucleoside
  modified_base 6: mod_base = OTHER; note = 2'-O-methyl modified nucleoside
  modified_base 7: mod_base = OTHER; note = 2'-O-methyl modified nucleoside
  modified_base 8: mod_base = OTHER; note = 2'-O-methyl modified nucleoside
  modified_base 9: mod_base = OTHER; note = 2'-fluoro-modified nucleoside
  modified_base 10: mod_base = OTHER; note = 2'-O-methyl modified nucleoside
  modified_base 11: mod_base = OTHER; note = 2'-fluoro-modified nucleoside
  modified_base 12: mod_base = OTHER; note = 2'-O-methyl modified nucleoside
  modified_base 13: mod_base = OTHER; note = 2'-O-methyl modified nucleoside
  modified_base 14: mod_base = OTHER; note = 2'-O-methyl modified nucleoside
  modified_base 15: mod_base = OTHER; note = 2'-O-methyl modified nucleoside
  modified_base 16: mod_base = OTHER; note = 2'-O-methyl modified nucleoside
  modified_base 17: mod_base = OTHER; note = 2'-O-methyl modified nucleoside
  modified_base 18: mod_base = OTHER; note = 2'-O-methyl modified nucleoside
  modified_base 19: mod_base = OTHER; note = 2'-O-methyl modified nucleoside with phosphorothioate linkage
  modified_base 20: mod_base = OTHER; note = 2'-O-methyl modified nucleoside with phosphorothioate linkage
  modified_base 21: mod_base = OTHER; note = 2'-O-methyl modified nucleoside
cttgatccataagcttggatt

SEQ ID NO: 12876 - RNA, 21 nt, synthetic construct
  source 1..21: mol_type = other RNA
  misc_feature 1: note = ETL17 moiety with a phosphorothioate linkage
  modified_base 1: mod_base = OTHER; note = 2'-O-methyl modified nucleoside
  modified_base 2: mod_base = OTHER; note = 2'-O-methyl modified nucleoside
  modified_base 3: mod_base = OTHER; note = 2'-O-methyl modified nucleoside
  modified_base 4: mod_base = OTHER; note = 2'-O-methyl modified nucleoside
  modified_base 5: mod_base = OTHER; note = 2'-fluoro-modified nucleoside
  modified_base 6: mod_base = OTHER; note = 2'-fluoro-modified nucleoside
  modified_base 7: mod_base = OTHER; note = 2'-O-methyl modified nucleoside
  modified_base 8: mod_base = OTHER; note = 2'-fluoro-modified nucleoside
  modified_base 9: mod_base = OTHER; note = 2'-fluoro-modified nucleoside
  modified_base 10: mod_base = OTHER; note = 2'-O-methyl modified nucleoside
  modified_base 11: mod_base = OTHER; note = 2'-fluoro-modified nucleoside
  modified_base 12: mod_base = OTHER; note = 2'-O-methyl modified nucleoside
  modified_base 13: mod_base = OTHER; note = 2'-O-methyl modified nucleoside
  modified_base 14: mod_base = OTHER; note = 2'-O-methyl modified nucleoside
  modified_base 15: mod_base = OTHER; note = 2'-O-methyl modified nucleoside
  modified_base 16: mod_base = OTHER; note = 2'-O-methyl modified nucleoside
  modified_base 17: mod_base = OTHER; note = 2'-O-methyl modified nucleoside
  modified_base 18: mod_base = OTHER; note = 2'-O-methyl modified nucleoside
  modified_base 19: mod_base = OTHER; note = 2'-O-methyl modified nucleoside with phosphorothioate linkage
  modified_base 20: mod_base = OTHER; note = 2'-O-methyl modified nucleoside with phosphorothioate linkage
  modified_base 21: mod_base = OTHER; note = 2'-O-methyl modified nucleoside
acggaaagatgttctctaatt

SEQ ID NO: 12877 - RNA, 21 nt, synthetic construct
  source 1..21: mol_type = other RNA
  misc_feature 1: note = ETL17 moiety with a phosphorothioate linkage
  modified_base 1: mod_base = OTHER; note = 2'-O-methyl modified nucleoside
  modified_base 2: mod_base = OTHER; note = 2'-O-methyl modified nucleoside
  modified_base 3: mod_base = OTHER; note = 2'-O-methyl modified nucleoside
  modified_base 4: mod_base = OTHER; note = 2'-O-methyl modified nucleoside
  modified_base 5: mod_base = OTHER; note = 2'-fluoro-modified nucleoside
  modified_base 6: mod_base = OTHER; note = 2'-O-methyl modified nucleoside
  modified_base 7: mod_base = OTHER; note = 2'-O-methyl modified nucleoside
  modified_base 8: mod_base = OTHER; note = 2'-O-methyl modified nucleoside
  modified_base 9: mod_base = OTHER; note = 2'-fluoro-modified nucleoside
  modified_base 10: mod_base = OTHER; note = 2'-O-methyl modified nucleoside
  modified_base 11: mod_base = OTHER; note = 2'-fluoro-modified nucleoside
  modified_base 12: mod_base = OTHER; note = 2'-O-methyl modified nucleoside
  modified_base 13: mod_base = OTHER; note = 2'-O-methyl modified nucleoside
  modified_base 14: mod_base = OTHER; note = 2'-O-methyl modified nucleoside
  modified_base 15: mod_base = OTHER; note = 2'-O-methyl modified nucleoside
  modified_base 16: mod_base = OTHER; note = 2'-O-methyl modified nucleoside
  modified_base 17: mod_base = OTHER; note = 2'-O-methyl modified nucleoside
  modified_base 18: mod_base = OTHER; note = 2'-O-methyl modified nucleoside
  modified_base 19: mod_base = OTHER; note = 2'-O-methyl modified nucleoside with phosphorothioate linkage
  modified_base 20: mod_base = OTHER; note = 2'-O-methyl modified nucleoside with phosphorothioate linkage
  modified_base 21: mod_base = OTHER; note = 2'-O-methyl modified nucleoside
tccatgggcatatagttgatt

SEQ ID NO: 12878 - RNA, 21 nt, synthetic construct
  source 1..21: mol_type = other RNA
  misc_feature 1: note = ETL17 moiety with a phosphorothioate linkage
  modified_base 1: mod_base = OTHER; note = 2'-O-methyl modified nucleoside
  modified_base 2: mod_base = OTHER; note = 2'-O-methyl modified nucleoside
  modified_base 3: mod_base = OTHER; note = 2'-O-methyl modified nucleoside
  modified_base 4: mod_base = OTHER; note = 2'-O-methyl modified nucleoside
  modified_base 5: mod_base = OTHER; note = 2'-fluoro-modified nucleoside
  modified_base 6: mod_base = OTHER; note = 2'-O-methyl modified nucleoside
  modified_base 7: mod_base = OTHER; note = 2'-O-methyl modified nucleoside
  modified_base 8: mod_base = OTHER; note = 2'-fluoro-modified nucleoside
  modified_base 9: mod_base = OTHER; note = 2'-fluoro-modified nucleoside
  modified_base 10: mod_base = OTHER; note = 2'-O-methyl modified nucleoside
  modified_base 11: mod_base = OTHER; note = 2'-O-methyl modified nucleoside
  modified_base 12: mod_base = OTHER; note = 2'-O-methyl modified nucleoside
  modified_base 13: mod_base = OTHER; note = 2'-O-methyl modified nucleoside
  modified_base 14: mod_base = OTHER; note = 2'-O-methyl modified nucleoside
  modified_base 15: mod_base = OTHER; note = 2'-O-methyl modified nucleoside
  modified_base 16: mod_base = OTHER; note = 2'-O-methyl modified nucleoside
  modified_base 17: mod_base = OTHER; note = 2'-O-methyl modified nucleoside
  modified_base 18: mod_base = OTHER; note = 2'-O-methyl modified nucleoside
  modified_base 19: mod_base = OTHER; note = 2'-O-methyl modified nucleoside with phosphorothioate linkage
  modified_base 20: mod_base = OTHER; note = 2'-O-methyl modified nucleoside with phosphorothioate linkage
  modified_base 21: mod_base = OTHER; note = 2'-O-methyl modified nucleoside
tatagttgaattacttcgatt

SEQ ID NO: 12879 - DNA, 21 bp, synthetic construct
  source 1..21: mol_type = other DNA
  misc_feature 1: note = ETL17 moiety with a phosphorothioate linkage
  modified_base 1: mod_base = OTHER; note = 2'-O-methyl modified nucleoside
  modified_base 2: mod_base = OTHER; note = 2'-O-methyl modified nucleoside
  modified_base 3: mod_base = OTHER; note = 2'-O-methyl modified nucleoside
  modified_base 4: mod_base = OTHER; note = 2'-O-methyl modified nucleoside
  modified_base 5: mod_base = OTHER; note = 2'-O-methyl modified nucleoside
  modified_base 6: mod_base = OTHER; note = 2'-fluoro-modified nucleoside
  modified_base 7: mod_base = OTHER; note = 2'-fluoro-modified nucleoside
  modified_base 8: mod_base = OTHER; note = 2'-fluoro-modified nucleoside
  modified_base 10: mod_base = OTHER; note = 2'-O-methyl modified nucleoside
  modified_base 11: mod_base = OTHER; note = 2'-O-methyl modified nucleoside
  modified_base 12: mod_base = OTHER; note = 2'-O-methyl modified nucleoside
  modified_base 13: mod_base = OTHER; note = 2'-O-methyl modified nucleoside
  modified_base 14: mod_base = OTHER; note = 2'-O-methyl modified nucleoside
  modified_base 15: mod_base = OTHER; note = 2'-O-methyl modified nucleoside
  modified_base 16: mod_base = OTHER; note = 2'-O-methyl modified nucleoside
  modified_base 17: mod_base = OTHER; note = 2'-O-methyl modified nucleoside
  modified_base 18: mod_base = OTHER; note = 2'-O-methyl modified nucleoside
  modified_base 19: mod_base = OTHER; note = 2'-O-methyl modified nucleoside with phosphorothioate linkage
  modified_base 20: mod_base = OTHER; note = 2'-O-methyl modified nucleoside with phosphorothioate linkage
  modified_base 21: mod_base = OTHER; note = 2'-O-methyl modified nucleoside
  misc_feature 1..8: note = RNA
  misc_feature 9: note = DNA
  misc_feature 10..21: note = RNA
atagttgaattacttcgaatt

SEQ ID NO: 12880 - RNA, 21 nt, synthetic construct
  source 1..21: mol_type = other RNA
  misc_feature 1: note = ETL17 moiety with a phosphorothioate linkage
  modified_base 1: mod_base = OTHER; note = 2'-O-methyl modified nucleoside
  modified_base 2: mod_base = OTHER; note = 2'-O-methyl modified nucleoside
  modified_base 3: mod_base = OTHER; note = 2'-O-methyl modified nucleoside
  modified_base 4: mod_base = OTHER; note = 2'-O-methyl modified nucleoside
  modified_base 5: mod_base = OTHER; note = 2'-O-methyl modified nucleoside
  modified_base 6: mod_base = OTHER; note = 2'-O-methyl modified nucleoside
  modified_base 7: mod_base = OTHER; note = 2'-O-methyl modified nucleoside
  modified_base 8: mod_base = OTHER; note = 2'-fluoro-modified nucleoside
  modified_base 9: mod_base = OTHER; note = 2'-fluoro-modified nucleoside
  modified_base 10: mod_base = OTHER; note = 2'-O-methyl modified nucleoside
  modified_base 11: mod_base = OTHER; note = 2'-fluoro-modified nucleoside
  modified_base 12: mod_base = OTHER; note = 2'-O-methyl modified nucleoside
  modified_base 13: mod_base = OTHER; note = 2'-O-methyl modified nucleoside
  modified_base 14: mod_base = OTHER; note = 2'-O-methyl modified nucleoside
  modified_base 15: mod_base = OTHER; note = 2'-O-methyl modified nucleoside
  modified_base 16: mod_base = OTHER; note = 2'-O-methyl modified nucleoside
  modified_base 17: mod_base = OTHER; note = 2'-O-methyl modified nucleoside
  modified_base 18: mod_base = OTHER; note = 2'-O-methyl modified nucleoside
  modified_base 19: mod_base = OTHER; note = 2'-O-methyl modified nucleoside with phosphorothioate linkage
  modified_base 20: mod_base = OTHER; note = 2'-O-methyl modified nucleoside with phosphorothioate linkage
  modified_base 21: mod_base = OTHER; note = 2'-O-methyl modified nucleoside
agttgaattacttcgacaatt

SEQ ID NO: 12881 - DNA, 21 bp, synthetic construct
  source 1..21: mol_type = other DNA
  misc_feature 1: note = ETL17 moiety with a phosphorothioate linkage
  modified_base 1: mod_base = OTHER; note = 2'-O-methyl modified nucleoside
  modified_base 2: mod_base = OTHER; note = 2'-O-methyl modified nucleoside
  modified_base 3: mod_base = OTHER; note = 2'-O-methyl modified nucleoside
  modified_base 4: mod_base = OTHER; note = 2'-O-methyl modified nucleoside
  modified_base 5: mod_base = OTHER; note = 2'-O-methyl modified nucleoside
  modified_base 6: mod_base = OTHER; note = 2'-fluoro-modified nucleoside
  modified_base 7: mod_base = OTHER; note = 2'-fluoro-modified nucleoside
  modified_base 8: mod_base = OTHER; note = 2'-fluoro-modified nucleoside
  modified_base 10: mod_base = OTHER; note = 2'-O-methyl modified nucleoside
  modified_base 11: mod_base = OTHER; note = 2'-O-methyl modified nucleoside
  modified_base 12: mod_base = OTHER; note = 2'-O-methyl modified nucleoside
  modified_base 13: mod_base = OTHER; note = 2'-O-methyl modified nucleoside
  modified_base 14: mod_base = OTHER; note = 2'-O-methyl modified nucleoside
  modified_base 15: mod_base = OTHER; note = 2'-O-methyl modified nucleoside
  modified_base 16: mod_base = OTHER; note = 2'-O-methyl modified nucleoside
  modified_base 17: mod_base = OTHER; note = 2'-O-methyl modified nucleoside
  modified_base 18: mod_base = OTHER; note = 2'-O-methyl modified nucleoside
  modified_base 19: mod_base = OTHER; note = 2'-O-methyl modified nucleoside with phosphorothioate linkage
  modified_base 20: mod_base = OTHER; note = 2'-O-methyl modified nucleoside with phosphorothioate linkage
  modified_base 21: mod_base = OTHER; note = 2'-O-methyl modified nucleoside
  misc_feature 1..8: note = RNA
  misc_feature 9: note = DNA
  misc_feature 10..21: note = RNA
ttcgacagcagcaattctatt

SEQ ID NO: 12882 - DNA, 21 bp, synthetic construct
  source 1..21: mol_type = other DNA
  misc_feature 1: note = ETL17 moiety with a phosphorothioate linkage
  modified_base 1: mod_base = OTHER; note = 2'-O-methyl modified nucleoside
  modified_base 2: mod_base = OTHER; note = 2'-O-methyl modified nucleoside
  modified_base 3: mod_base = OTHER; note = 2'-O-methyl modified nucleoside
  modified_base 4: mod_base = OTHER; note = 2'-O-methyl modified nucleoside
  modified_base 5: mod_base = OTHER; note = 2'-O-methyl modified nucleoside
  modified_base 6: mod_base = OTHER; note = 2'-fluoro-modified nucleoside
  modified_base 7: mod_base = OTHER; note = 2'-fluoro-modified nucleoside
  modified_base 8: mod_base = OTHER; note = 2'-fluoro-modified nucleoside
  modified_base 10: mod_base = OTHER; note = 2'-O-methyl modified nucleoside
  modified_base 11: mod_base = OTHER; note = 2'-O-methyl modified nucleoside
  modified_base 12: mod_base = OTHER; note = 2'-O-methyl modified nucleoside
  modified_base 13: mod_base = OTHER; note = 2'-O-methyl modified nucleoside
  modified_base 14: mod_base = OTHER; note = 2'-O-methyl modified nucleoside
  modified_base 15: mod_base = OTHER; note = 2'-O-methyl modified nucleoside
  modified_base 16: mod_base = OTHER; note = 2'-O-methyl modified nucleoside
  modified_base 17: mod_base = OTHER; note = 2'-O-methyl modified nucleoside
  modified_base 18: mod_base = OTHER; note = 2'-O-methyl modified nucleoside
  modified_base 19: mod_base = OTHER; note = 2'-O-methyl modified nucleoside with phosphorothioate linkage
  modified_base 20: mod_base = OTHER; note = 2'-O-methyl modified nucleoside with phosphorothioate linkage
  modified_base 21: mod_base = OTHER; note = 2'-O-methyl modified nucleoside
  misc_feature 1..8: note = RNA
  misc_feature 9: note = DNA
  misc_feature 10..21: note = RNA
agttgtggtagatactctatt

SEQ ID NO: 12883 - RNA, 21 nt, synthetic construct
  source 1..21: mol_type = other RNA
  misc_feature 1: note = ETL17 moiety with a phosphorothioate linkage
  modified_base 1: mod_base = OTHER; note = 2'-O-methyl modified nucleoside
  modified_base 2: mod_base = OTHER; note = 2'-O-methyl modified nucleoside
  modified_base 3: mod_base = OTHER; note = 2'-O-methyl modified nucleoside
  modified_base 4: mod_base = OTHER; note = 2'-O-methyl modified nucleoside
  modified_base 5: mod_base = OTHER; note = 2'-O-methyl modified nucleoside
  modified_base 6: mod_base = OTHER; note = 2'-fluoro-modified nucleoside
  modified_base 7: mod_base = OTHER; note = 2'-fluoro-modified nucleoside
  modified_base 8: mod_base = OTHER; note = 2'-O-methyl modified nucleoside
  modified_base 9: mod_base = OTHER; note = 2'-fluoro-modified nucleoside
  modified_base 10: mod_base = OTHER; note = 2'-fluoro-modified nucleoside
  modified_base 11: mod_base = OTHER; note = 2'-O-methyl modified nucleoside
  modified_base 12: mod_base = OTHER; note = 2'-O-methyl modified nucleoside
  modified_base 13: mod_base = OTHER; note = 2'-O-methyl modified nucleoside
  modified_base 14: mod_base = OTHER; note = 2'-O-methyl modified nucleoside
  modified_base 15: mod_base = OTHER; note = 2'-O-methyl modified nucleoside
  modified_base 16: mod_base = OTHER; note = 2'-O-methyl modified nucleoside
  modified_base 17: mod_base = OTHER; note = 2'-O-methyl modified nucleoside
  modified_base 18: mod_base = OTHER; note = 2'-O-methyl modified nucleoside
  modified_base 19: mod_base = OTHER; note = 2'-O-methyl modified nucleoside with phosphorothioate linkage
  modified_base 20: mod_base = OTHER; note = 2'-O-methyl modified nucleoside with phosphorothioate linkage
  modified_base 21: mod_base = OTHER; note = 2'-O-methyl modified nucleoside
tggaatctcctatgatcgatt

SEQ ID NO: 12884 - RNA, 21 nt, synthetic construct
  source 1..21: mol_type = other RNA
  misc_feature 1: note = ETL17 moiety with a phosphorothioate linkage
  modified_base 1: mod_base = OTHER; note = 2'-O-methyl modified nucleoside
  modified_base 2: mod_base = OTHER; note = 2'-O-methyl modified nucleoside
  modified_base 3: mod_base = OTHER; note = 2'-O-methyl modified nucleoside
  modified_base 4: mod_base = OTHER; note = 2'-O-methyl modified nucleoside
  modified_base 5: mod_base = OTHER; note = 2'-O-methyl modified nucleoside
  modified_base 6: mod_base = OTHER; note = 2'-O-methyl modified nucleoside
  modified_base 7: mod_base = OTHER; note = 2'-O-methyl modified nucleoside
  modified_base 8: mod_base = OTHER; note = 2'-fluoro-modified nucleoside
  modified_base 9: mod_base = OTHER; note = 2'-fluoro-modified nucleoside
  modified_base 10: mod_base = OTHER; note = 2'-O-methyl modified nucleoside
  modified_base 11: mod_base = OTHER; note = 2'-fluoro-modified nucleoside
  modified_base 12: mod_base = OTHER; note = 2'-O-methyl modified nucleoside
  modified_base 13: mod_base = OTHER; note = 2'-O-methyl modified nucleoside
  modified_base 14: mod_base = OTHER; note = 2'-O-methyl modified nucleoside
  modified_base 15: mod_base = OTHER; note = 2'-O-methyl modified nucleoside
  modified_base 16: mod_base = OTHER; note = 2'-O-methyl modified nucleoside
  modified_base 17: mod_base = OTHER; note = 2'-O-methyl modified nucleoside
  modified_base 18: mod_base = OTHER; note = 2'-O-methyl modified nucleoside
  modified_base 19: mod_base = OTHER; note = 2'-O-methyl modified nucleoside with phosphorothioate linkage
  modified_base 20: mod_base = OTHER; note = 2'-O-methyl modified nucleoside with phosphorothioate linkage
  modified_base 21: mod_base = OTHER; note = 2'-O-methyl modified nucleoside
tcgaaggtcactacaatgatt

SEQ ID NO: 12885 - RNA, 21 nt, synthetic construct
  source 1..21: mol_type = other RNA
  misc_feature 1: note = ETL17 moiety with a phosphorothioate linkage
  modified_base 1: mod_base = OTHER; note = 2'-O-methyl modified nucleoside
  modified_base 2: mod_base = OTHER; note = 2'-O-methyl modified nucleoside
  modified_base 3: mod_base = OTHER; note = 2'-O-methyl modified nucleoside
  modified_base 4: mod_base = OTHER; note = 2'-O-methyl modified nucleoside
  modified_base 5: mod_base = OTHER; note = 2'-fluoro-modified nucleoside
  modified_base 6: mod_base = OTHER; note = 2'-O-methyl modified nucleoside
  modified_base 7: mod_base = OTHER; note = 2'-O-methyl modified nucleoside
  modified_base 8: mod_base = OTHER; note = 2'-fluoro-modified nucleoside
  modified_base 9: mod_base = OTHER; note = 2'-fluoro-modified nucleoside
  modified_base 10: mod_base = OTHER; note = 2'-O-methyl modified nucleoside
  modified_base 11: mod_base = OTHER; note = 2'-fluoro-modified nucleoside
  modified_base 12: mod_base = OTHER; note = 2'-O-methyl modified nucleoside
  modified_base 13: mod_base = OTHER; note = 2'-O-methyl modified nucleoside
  modified_base 14: mod_base = OTHER; note = 2'-O-methyl modified nucleoside
  modified_base 15: mod_base = OTHER; note = 2'-O-methyl modified nucleoside
  modified_base 16: mod_base = OTHER; note = 2'-O-methyl modified nucleoside
  modified_base 17: mod_base = OTHER; note = 2'-O-methyl modified nucleoside
  modified_base 18: mod_base = OTHER; note = 2'-O-methyl modified nucleoside
  modified_base 19: mod_base = OTHER; note = 2'-O-methyl modified nucleoside with phosphorothioate linkage
  modified_base 20: mod_base = OTHER; note = 2'-O-methyl modified nucleoside with phosphorothioate linkage
  modified_base 21: mod_base = OTHER; note = 2'-O-methyl modified nucleoside
tgttattagaatgttacgatt

SEQ ID NO: 12886 - RNA, 21 nt, synthetic construct
  source 1..21: mol_type = other RNA
  misc_feature 1: note = ETL17 moiety with a phosphorothioate linkage
  modified_base 1: mod_base = OTHER; note = 2'-O-methyl modified nucleoside
  modified_base 2: mod_base = OTHER; note = 2'-O-methyl modified nucleoside
  modified_base 3: mod_base = OTHER; note = 2'-O-methyl modified nucleoside
  modified_base 4: mod_base = OTHER; note = 2'-O-methyl modified nucleoside
  modified_base 5: mod_base = OTHER; note = 2'-O-methyl modified nucleoside
  modified_base 6: mod_base = OTHER; note = 2'-fluoro-modified nucleoside
  modified_base 7: mod_base = OTHER; note = 2'-O-methyl modified nucleoside
  modified_base 8: mod_base = OTHER; note = 2'-fluoro-modified nucleoside
  modified_base 9: mod_base = OTHER; note = 2'-fluoro-modified nucleoside
  modified_base 10: mod_base = OTHER; note = 2'-O-methyl modified nucleoside
  modified_base 11: mod_base = OTHER; note = 2'-O-methyl modified nucleoside
  modified_base 12: mod_base = OTHER; note = 2'-O-methyl modified nucleoside
  modified_base 13: mod_base = OTHER; note = 2'-O-methyl modified nucleoside
  modified_base 14: mod_base = OTHER; note = 2'-O-methyl modified nucleoside
  modified_base 15: mod_base = OTHER; note = 2'-O-methyl modified nucleoside
  modified_base 16: mod_base = OTHER; note = 2'-O-methyl modified nucleoside
  modified_base 17: mod_base = OTHER; note = 2'-O-methyl modified nucleoside
  modified_base 18: mod_base = OTHER; note = 2'-O-methyl modified nucleoside
  modified_base 19: mod_base = OTHER; note = 2'-O-methyl modified nucleoside with phosphorothioate linkage
  modified_base 20: mod_base = OTHER; note = 2'-O-methyl modified nucleoside with phosphorothioate linkage
  modified_base 21: mod_base = OTHER; note = 2'-O-methyl modified nucleoside
aaactatggttgtgtccgatt

SEQ ID NO: 12887 - RNA, 21 nt, synthetic construct
  source 1..21: mol_type = other RNA
  misc_feature 1: note = ETL17 moiety with a phosphorothioate linkage
  modified_base 1: mod_base = OTHER; note = 2'-O-methyl modified nucleoside
  modified_base 2: mod_base = OTHER; note = 2'-O-methyl modified nucleoside
  modified_base 3: mod_base = OTHER; note = 2'-O-methyl modified nucleoside
  modified_base 4: mod_base = OTHER; note = 2'-O-methyl modified nucleoside
  modified_base 5: mod_base = OTHER; note = 2'-O-methyl modified nucleoside
  modified_base 6: mod_base = OTHER; note = 2'-fluoro-modified nucleoside
  modified_base 7: mod_base = OTHER; note = 2'-fluoro-modified nucleoside
  modified_base 8: mod_base = OTHER; note = 2'-O-methyl modified nucleoside
  modified_base 9: mod_base = OTHER; note = 2'-fluoro-modified nucleoside
  modified_base 10: mod_base = OTHER; note = 2'-fluoro-modified nucleoside
  modified_base 11: mod_base = OTHER; note = 2'-O-methyl modified nucleoside
  modified_base 12: mod_base = OTHER; note = 2'-O-methyl modified nucleoside
  modified_base 13: mod_base = OTHER; note = 2'-O-methyl modified nucleoside
  modified_base 14: mod_base = OTHER; note = 2'-O-methyl modified nucleoside
  modified_base 15: mod_base = OTHER; note = 2'-O-methyl modified nucleoside
  modified_base 16: mod_base = OTHER; note = 2'-O-methyl modified nucleoside
  modified_base 17: mod_base = OTHER; note = 2'-O-methyl modified nucleoside
  modified_base 18: mod_base = OTHER; note = 2'-O-methyl modified nucleoside
  modified_base 19: mod_base = OTHER; note = 2'-O-methyl modified nucleoside with phosphorothioate linkage
  modified_base 20: mod_base = OTHER; note = 2'-O-methyl modified nucleoside with phosphorothioate linkage
  modified_base 21: mod_base = OTHER; note = 2'-O-methyl modified nucleoside
aagcgttgttaccagctaatt

SEQ ID NO: 12888 - DNA, 21 bp, synthetic construct
  source 1..21: mol_type = other DNA
  misc_feature 1: note = ETL17 moiety with a phosphorothioate linkage
  modified_base 1: mod_base = OTHER; note = 2'-O-methyl modified nucleoside
  modified_base 2: mod_base = OTHER; note = 2'-O-methyl modified nucleoside
  modified_base 3: mod_base = OTHER; note = 2'-O-methyl modified nucleoside
  modified_base 4: mod_base = OTHER; note = 2'-O-methyl modified nucleoside
  modified_base 5: mod_base = OTHER; note = 2'-O-methyl modified nucleoside
  modified_base 6: mod_base = OTHER; note = 2'-fluoro-modified nucleoside
  modified_base 7: mod_base = OTHER; note = 2'-fluoro-modified nucleoside
  modified_base 8: mod_base = OTHER; note = 2'-fluoro-modified nucleoside
  modified_base 10: mod_base = OTHER; note = 2'-O-methyl modified nucleoside
  modified_base 11: mod_base = OTHER; note = 2'-O-methyl modified nucleoside
  modified_base 12: mod_base = OTHER; note = 2'-O-methyl modified nucleoside
  modified_base 13: mod_base = OTHER; note = 2'-O-methyl modified nucleoside
  modified_base 14: mod_base = OTHER; note = 2'-O-methyl modified nucleoside
  modified_base 15: mod_base = OTHER; note = 2'-O-methyl modified nucleoside
  modified_base 16: mod_base = OTHER; note = 2'-O-methyl modified nucleoside
  modified_base 17: mod_base = OTHER; note = 2'-O-methyl modified nucleoside
  modified_base 18: mod_base = OTHER; note = 2'-O-methyl modified nucleoside
  modified_base 19: mod_base = OTHER; note = 2'-O-methyl modified nucleoside with phosphorothioate linkage
  modified_base 20: mod_base = OTHER; note = 2'-O-methyl modified nucleoside with phosphorothioate linkage
  modified_base 21: mod_base = OTHER; note = 2'-O-methyl modified nucleoside
  misc_feature 1..8: note = RNA
  misc_feature 9: note = DNA
  misc_feature 10..21: note = RNA
tattcactgctagcaagtatt

SEQ ID NO: 12889 - RNA, 21 nt, synthetic construct
  source 1..21: mol_type = other RNA
  misc_feature 1: note = ETL17 moiety with a phosphorothioate linkage
  modified_base 1: mod_base = OTHER; note = 2'-O-methyl modified nucleoside
  modified_base 2: mod_base = OTHER; note = 2'-O-methyl modified nucleoside
  modified_base 3: mod_base = OTHER; note = 2'-O-methyl modified nucleoside
  modified_base 4: mod_base = OTHER; note = 2'-O-methyl modified nucleoside
  modified_base 5: mod_base = OTHER; note = 2'-O-methyl modified nucleoside
  modified_base 6: mod_base = OTHER; note = 2'-fluoro-modified nucleoside
  modified_base 7: mod_base = OTHER; note = 2'-fluoro-modified nucleoside
  modified_base 8: mod_base = OTHER; note = 2'-O-methyl modified nucleoside
  modified_base 9: mod_base = OTHER; note = 2'-fluoro-modified nucleoside
  modified_base 10: mod_base = OTHER; note = 2'-fluoro-modified nucleoside
  modified_base 11: mod_base = OTHER; note = 2'-O-methyl modified nucleoside
  modified_base 12: mod_base = OTHER; note = 2'-O-methyl modified nucleoside
  modified_base 13: mod_base = OTHER; note = 2'-O-methyl modified nucleoside
  modified_base 14: mod_base = OTHER; note = 2'-O-methyl modified nucleoside
  modified_base 15: mod_base = OTHER; note = 2'-O-methyl modified nucleoside
  modified_base 16: mod_base = OTHER; note = 2'-O-methyl modified nucleoside
  modified_base 17: mod_base = OTHER; note = 2'-O-methyl modified nucleoside
  modified_base 18: mod_base = OTHER; note = 2'-O-methyl modified nucleoside
  modified_base 19: mod_base = OTHER; note = 2'-O-methyl modified nucleoside with phosphorothioate linkage
  modified_base 20: mod_base = OTHER; note = 2'-O-methyl modified nucleoside with phosphorothioate linkage
  modified_base 21: mod_base = OTHER; note = 2'-O-methyl modified nucleoside
attcactgctagcaagtcatt

SEQ ID NO: 12890 - RNA, 21 nt, synthetic construct
  source 1..21: mol_type = other RNA
  misc_feature 1: note = ETL17 moiety with a phosphorothioate linkage
  modified_base 1: mod_base = OTHER; note = 2'-O-methyl modified nucleoside
  modified_base 2: mod_base = OTHER; note = 2'-O-methyl modified nucleoside
  modified_base 3: mod_base = OTHER; note = 2'-O-methyl modified nucleoside
  modified_base 4: mod_base = OTHER; note = 2'-O-methyl modified nucleoside
  modified_base 5: mod_base = OTHER; note = 2'-fluoro-modified nucleoside
  modified_base 6: mod_base = OTHER; note = 2'-O-methyl modified nucleoside
  modified_base 7: mod_base = OTHER; note = 2'-O-methyl modified nucleoside
  modified_base 8: mod_base = OTHER; note = 2'-O-methyl modified nucleoside
  modified_base 9: mod_base = OTHER; note = 2'-fluoro-modified nucleoside
  modified_base 10: mod_base = OTHER; note = 2'-O-methyl modified nucleoside
  modified_base 11: mod_base = OTHER; note = 2'-fluoro-modified nucleoside
  modified_base 12: mod_base = OTHER; note = 2'-O-methyl modified nucleoside
  modified_base 13: mod_base = OTHER; note = 2'-O-methyl modified nucleoside
  modified_base 14: mod_base = OTHER; note = 2'-O-methyl modified nucleoside
  modified_base 15: mod_base = OTHER; note = 2'-O-methyl modified nucleoside
  modified_base 16: mod_base = OTHER; note = 2'-O-methyl modified nucleoside
  modified_base 17: mod_base = OTHER; note = 2'-O-methyl modified nucleoside
  modified_base 18: mod_base = OTHER; note = 2'-O-methyl modified nucleoside
  modified_base 19: mod_base = OTHER; note = 2'-O-methyl modified nucleoside with phosphorothioate linkage
  modified_base 20: mod_base = OTHER; note = 2'-O-methyl modified nucleoside with phosphorothioate linkage
  modified_base 21: mod_base = OTHER; note = 2'-O-methyl modified nucleoside
ttatgtccacacacattgatt

SEQ ID NO: 12891 - RNA, 21 nt, synthetic construct
  source 1..21: mol_type = other RNA
  misc_feature 1: note = ETL17 moiety with a phosphorothioate linkage
  modified_base 1: mod_base = OTHER; note = 2'-O-methyl modified nucleoside
  modified_base 2: mod_base = OTHER; note = 2'-O-methyl modified nucleoside
  modified_base 3: mod_base = OTHER; note = 2'-O-methyl modified nucleoside
  modified_base 4: mod_base = OTHER; note = 2'-O-methyl modified nucleoside
  modified_base 5: mod_base = OTHER; note = 2'-fluoro-modified nucleoside
  modified_base 6: mod_base = OTHER; note = 2'-fluoro-modified nucleoside
  modified_base 7: mod_base = OTHER; note = 2'-O-methyl modified nucleoside
  modified_base 8: mod_base = OTHER; note = 2'-fluoro-modified nucleoside
  modified_base 9: mod_base = OTHER; note = 2'-fluoro-modified nucleoside
  modified_base 10: mod_base = OTHER; note = 2'-O-methyl modified nucleoside
  modified_base 11: mod_base = OTHER; note = 2'-fluoro-modified nucleoside
  modified_base 12: mod_base = OTHER; note = 2'-O-methyl modified nucleoside
  modified_base 13: mod_base = OTHER; note = 2'-O-methyl modified nucleoside
  modified_base 14: mod_base = OTHER; note = 2'-O-methyl modified nucleoside
  modified_base 15: mod_base = OTHER; note = 2'-O-methyl modified nucleoside
  modified_base 16: mod_base = OTHER; note = 2'-O-methyl modified nucleoside
  modified_base 17: mod_base = OTHER; note = 2'-O-methyl modified nucleoside
  modified_base 18: mod_base = OTHER; note = 2'-O-methyl modified nucleoside
  modified_base 19: mod_base = OTHER; note = 2'-O-methyl modified nucleoside with phosphorothioate linkage
  modified_base 20: mod_base = OTHER; note = 2'-O-methyl modified nucleoside with phosphorothioate linkage
  modified_base 21: mod_base = OTHER; note = 2'-O-methyl modified nucleoside
aacagaaagaaatgttgcatt

SEQ ID NO: 12892 - RNA, 21 nt, synthetic construct
  source 1..21: mol_type = other RNA
  misc_feature 1: note = ETL17 moiety with a phosphorothioate linkage
  modified_base 1: mod_base = OTHER; note = 2'-O-methyl modified nucleoside
  modified_base 2: mod_base = OTHER; note = 2'-O-methyl modified nucleoside
  modified_base 3: mod_base = OTHER; note = 2'-O-methyl modified nucleoside
  modified_base 4: mod_base = OTHER; note = 2'-O-methyl modified nucleoside
  modified_base 5: mod_base = OTHER; note = 2'-O-methyl modified nucleoside
  modified_base 6: mod_base = OTHER; note = 2'-fluoro-modified nucleoside
  modified_base 7: mod_base = OTHER; note = 2'-fluoro-modified nucleoside
  modified_base 8: mod_base = OTHER; note = 2'-fluoro-modified nucleoside
  modified_base 9: mod_base = OTHER; note = 2'-fluoro-modified nucleoside
  modified_base 10: mod_base = OTHER; note = 2'-O-methyl modified nucleoside
  modified_base 11: mod_base = OTHER; note = 2'-O-methyl modified nucleoside
  modified_base 12: mod_base = OTHER; note = 2'-O-methyl modified nucleoside
  modified_base 13: mod_base = OTHER; note = 2'-O-methyl modified nucleoside
  modified_base 14: mod_base = OTHER; note = 2'-O-methyl modified nucleoside
  modified_base 15: mod_base = OTHER; note = 2'-O-methyl modified nucleoside
  modified_base 16: mod_base = OTHER; note = 2'-O-methyl modified nucleoside
  modified_base 17: mod_base = OTHER; note = 2'-O-methyl modified nucleoside
  modified_base 18: mod_base = OTHER; note = 2'-O-methyl modified nucleoside
  modified_base 19: mod_base = OTHER; note = 2'-O-methyl modified nucleoside with phosphorothioate linkage
  modified_base 20: mod_base = OTHER; note = 2'-O-methyl modified nucleoside with phosphorothioate linkage
  modified_base 21: mod_base = OTHER; note = 2'-O-methyl modified nucleoside
atatattctgagttttgtatt

SEQ ID NO: 12893 - RNA, 21 nt, synthetic construct
  source 1..21: mol_type = other RNA
  misc_feature 1: note = ETL17 moiety with a phosphorothioate linkage
  modified_base 1: mod_base = OTHER; note = 2'-O-methyl modified nucleoside
  modified_base 2: mod_base = OTHER; note = 2'-O-methyl modified nucleoside
  modified_base 3: mod_base = OTHER; note = 2'-O-methyl modified nucleoside
  modified_base 4: mod_base = OTHER; note = 2'-O-methyl modified nucleoside
  modified_base 5: mod_base = OTHER; note = 2'-O-methyl modified nucleoside
  modified_base 6: mod_base = OTHER; note = 2'-fluoro-modified nucleoside
  modified_base 7: mod_base = OTHER; note = 2'-fluoro-modified nucleoside
  modified_base 8: mod_base = OTHER; note = 2'-fluoro-modified nucleoside
  modified_base 9: mod_base = OTHER; note = 2'-fluoro-modified nucleoside
  modified_base 10: mod_base = OTHER; note = 2'-O-methyl modified nucleoside
  modified_base 11: mod_base = OTHER; note = 2'-O-methyl modified nucleoside
  modified_base 12: mod_base = OTHER; note = 2'-O-methyl modified nucleoside
  modified_base 13: mod_base = OTHER; note = 2'-O-methyl modified nucleoside
  modified_base 14: mod_base = OTHER; note = 2'-O-methyl modified nucleoside
  modified_base 15: mod_base = OTHER; note = 2'-methoxy ethyl thymidine
  modified_base 16: mod_base = OTHER; note = 2'-O-methyl modified nucleoside
  modified_base 17: mod_base = OTHER; note = 2'-O-methyl modified nucleoside
  modified_base 18: mod_base = OTHER; note = 2'-O-methyl modified nucleoside
  modified_base 19: mod_base = OTHER; note = 2'-O-methyl modified nucleoside with phosphorothioate linkage
  modified_base 20: mod_base = OTHER; note = 2'-O-methyl modified nucleoside with phosphorothioate linkage
  modified_base 21: mod_base = OTHER; note = 2'-O-methyl modified nucleoside
aaactatggttgtgtccgatt

SEQ ID NO: 12894 - RNA, 21 nt, synthetic construct
  source 1..21: mol_type = other RNA
  misc_feature 1: note = ETL17 moiety with a phosphorothioate linkage
  modified_base 1: mod_base = OTHER; note = 2'-O-methyl modified nucleoside
  modified_base 2: mod_base = OTHER; note = 2'-O-methyl modified nucleoside
  modified_base 3: mod_base = OTHER; note = 2'-O-methyl modified nucleoside
  modified_base 4: mod_base = OTHER; note = 2'-O-methyl modified nucleoside
  modified_base 5: mod_base = OTHER; note = 2'-O-methyl modified nucleoside
  modified_base 6: mod_base = OTHER; note = 2'-fluoro-modified nucleoside
  modified_base 7: mod_base = OTHER; note = 2'-O-methyl modified nucleoside
  modified_base 8: mod_base = OTHER; note = 2'-fluoro-modified nucleoside
  modified_base 9: mod_base = OTHER; note = 2'-fluoro-modified nucleoside
  modified_base 10: mod_base = OTHER; note = 2'-O-methyl modified nucleoside
  modified_base 11: mod_base = OTHER; note = 2'-O-methyl modified nucleoside
  modified_base 12: mod_base = OTHER; note = 2'-O-methyl modified nucleoside
  modified_base 13: mod_base = OTHER; note = 2'-O-methyl modified nucleoside
  modified_base 14: mod_base = OTHER; note = 2'-O-methyl modified nucleoside
  modified_base 15: mod_base = OTHER; note = 2'-O-methyl modified nucleoside
  modified_base 16: mod_base = OTHER; note = 2'-O-methyl modified nucleoside
  modified_base 17: mod_base = OTHER; note = 2'-O-methyl modified nucleoside
  modified_base 18: mod_base = OTHER; note = 2'-O-methyl modified nucleoside
  modified_base 19: mod_base = OTHER; note = 2'-O-methyl modified nucleoside with phosphorothioate linkage
  modified_base 20: mod_base = OTHER; note = 2'-O-methyl modified nucleoside with phosphorothioate linkage
  modified_base 21: mod_base = OTHER; note = 2'-O-methyl modified nucleoside
aaactatggttgtgtccgatt

SEQ ID NO: 12895 - RNA, 21 nt, synthetic construct
  source 1..21: mol_type = other RNA
  misc_feature 1: note = ETL17 moiety with a phosphorothioate linkage
  modified_base 1: mod_base = OTHER; note = 2'-O-methyl modified nucleoside
  modified_base 2: mod_base = OTHER; note = 2'-O-methyl modified nucleoside
  modified_base 3: mod_base = OTHER; note = 2'-O-methyl modified nucleoside
  modified_base 4: mod_base = OTHER; note = 2'-O-methyl modified nucleoside
  modified_base 5: mod_base = OTHER; note = 2'-O-methyl modified nucleoside
  modified_base 6: mod_base = OTHER; note = 2'-fluoro-modified nucleoside
  modified_base 7: mod_base = OTHER; note = 2'-O-methyl modified nucleoside
  modified_base 8: mod_base = OTHER; note = 2'-fluoro-modified nucleoside
  modified_base 9: mod_base = OTHER; note = 2'-fluoro-modified nucleoside
  modified_base 10: mod_base = OTHER; note = 2'-O-methyl modified nucleoside
  modified_base 11: mod_base = OTHER; note = 2'-O-methyl modified nucleoside
  modified_base 12: mod_base = OTHER; note = 2'-O-methyl modified nucleoside
  modified_base 13: mod_base = OTHER; note = 2'-O-methyl modified nucleoside
  modified_base 14: mod_base = OTHER; note = 2'-O-methyl modified nucleoside
  modified_base 15: mod_base = OTHER; note = 2'-O-methyl modified nucleoside
  modified_base 16: mod_base = OTHER; note = 2'-O-methyl modified nucleoside
  modified_base 17: mod_base = OTHER; note = 2'-O-methyl modified nucleoside
  modified_base 18: mod_base = OTHER; note = 2'-O-methyl modified nucleoside
  modified_base 19: mod_base = OTHER; note = 2'-O-methyl modified nucleoside with phosphorothioate linkage
  modified_base 20: mod_base = OTHER; note = 2'-O-methyl modified nucleoside with phosphorothioate linkage
  modified_base 21: mod_base = OTHER; note = 2'-O-methyl modified nucleoside
aaactatggttgtgtccgatt

SEQ ID NO: 12896 - RNA, 21 nt, synthetic construct
  source 1..21: mol_type = other RNA
  misc_feature 1: note = ETL17 moiety with a phosphorothioate linkage
  modified_base 1: mod_base = OTHER; note = 2'-O-methyl modified nucleoside
  modified_base 2: mod_base = OTHER; note = 2'-O-methyl modified nucleoside
  modified_base 3: mod_base = OTHER; note = 2'-O-methyl modified nucleoside
  modified_base 4: mod_base = OTHER; note = 2'-O-methyl modified nucleoside
  modified_base 5: mod_base = OTHER; note = 2'-O-methyl modified nucleoside
  modified_base 6: mod_base = OTHER; note = 2'-fluoro-modified nucleoside
  modified_base 7: mod_base = OTHER; note = 2'-O-methyl modified nucleoside
  modified_base 8: mod_base = OTHER; note = 2'-fluoro-modified nucleoside
  modified_base 9: mod_base = OTHER; note = 2'-fluoro-modified nucleoside
  modified_base 10: mod_base = OTHER; note = 2'-O-methyl modified nucleoside
  modified_base 11: mod_base = OTHER; note = 2'-O-methyl modified nucleoside
  modified_base 12: mod_base = OTHER; note = 2'-O-methyl modified nucleoside
  modified_base 13: mod_base = OTHER; note = 2'-O-methyl modified nucleoside
  modified_base 14: mod_base = OTHER; note = 2'-O-methyl modified nucleoside
  modified_base 15: mod_base = OTHER; note = 2'-O-methyl modified nucleoside
  modified_base 16: mod_base = OTHER; note = 2'-O-methyl modified nucleoside
  modified_base 17: mod_base = OTHER; note = 2'-O-methyl modified nucleoside
  modified_base 18: mod_base = OTHER; note = 2'-O-methyl modified nucleoside
  modified_base 19: mod_base = OTHER; note = 2'-O-methyl modified nucleoside with phosphorothioate linkage
  modified_base 20: mod_base = OTHER; note = 2'-O-methyl modified nucleoside with phosphorothioate linkage
  modified_base 21: mod_base = OTHER; note = 2'-O-methyl modified nucleoside
aaactatggttgtgtccgatt

SEQ ID NO: 12897 - RNA, 21 nt, synthetic construct
  source 1..21: mol_type = other RNA
  misc_feature 1: note = ETL17 moiety with a phosphorothioate linkage
  modified_base 1: mod_base = OTHER; note = 2'-O-methyl modified nucleoside
  modified_base 2: mod_base = OTHER; note = 2'-O-methyl modified nucleoside
  modified_base 3: mod_base = OTHER; note = 2'-O-methyl modified nucleoside
  modified_base 4: mod_base = OTHER; note = 2'-O-methyl modified nucleoside
  modified_base 5: mod_base = OTHER; note = 2'-O-methyl modified nucleoside
  modified_base 6: mod_base = OTHER; note = 2'-fluoro-modified nucleoside
  modified_base 7: mod_base = OTHER; note = 2'-O-methyl modified nucleoside
  modified_base 8: mod_base = OTHER; note = 2'-fluoro-modified nucleoside
  modified_base 9: mod_base = OTHER; note = 2'-fluoro-modified nucleoside
  modified_base 10: mod_base = OTHER; note = 2'-O-methyl modified nucleoside
  modified_base 11: mod_base = OTHER; note = 2'-O-methyl modified nucleoside
  modified_base 12: mod_base = OTHER; note = 2'-O-methyl modified nucleoside
  modified_base 13: mod_base = OTHER; note = 2'-O-methyl modified nucleoside
  modified_base 14: mod_base = OTHER; note = 2'-O-methyl modified nucleoside
  modified_base 15: mod_base = OTHER; note = 2'-O-methyl modified nucleoside
  modified_base 16: mod_base = OTHER; note = 2'-O-methyl modified nucleoside
  modified_base 17: mod_base = OTHER; note = 2'-O-methyl modified nucleoside
  modified_base 18: mod_base = OTHER; note = 2'-O-methyl modified nucleoside
  modified_base 19: mod_base = OTHER; note = 2'-O-methyl modified nucleoside with phosphorothioate linkage
  modified_base 20: mod_base = OTHER; note = 2'-O-methyl modified nucleoside with phosphorothioate linkage
  modified_base 21: mod_base = OTHER; note = 2'-O-methyl modified nucleoside
aaactatggttgtgtccgatt

SEQ ID NO: 12898 - RNA, 21 nt, synthetic construct
  source 1..21: mol_type = other RNA
  misc_feature 1: note = ETL17 moiety with a phosphorothioate linkage
  modified_base 1: mod_base = OTHER; note = 2'-O-methyl modified nucleoside
  modified_base 2: mod_base = OTHER; note = 2'-O-methyl modified nucleoside
  modified_base 3: mod_base = OTHER; note = 2'-O-methyl modified nucleoside
  modified_base 4: mod_base = OTHER; note = 2'-O-methyl modified nucleoside
  modified_base 5: mod_base = OTHER; note = 2'-O-methyl modified nucleoside
  modified_base 6: mod_base = OTHER; note = 2'-fluoro-modified nucleoside
  modified_base 7: mod_base = OTHER; note = 2'-O-methyl modified nucleoside
  modified_base 8: mod_base = OTHER; note = 2'-fluoro-modified nucleoside
  modified_base 9: mod_base = OTHER; note = 2'-fluoro-modified nucleoside
  modified_base 10: mod_base = OTHER; note = 2'-O-methyl modified nucleoside
  modified_base 11: mod_base = OTHER; note = 2'-O-methyl modified nucleoside
  modified_base 12: mod_base = OTHER; note = 2'-O-methyl modified nucleoside
  modified_base 13: mod_base = OTHER; note = 2'-O-methyl modified nucleoside
  modified_base 14: mod_base = OTHER; note = 2'-O-methyl modified nucleoside
  modified_base 15: mod_base = OTHER; note = 2'-O-methyl modified nucleoside
  modified_base 16: mod_base = OTHER; note = 2'-O-methyl modified nucleoside
  modified_base 17: mod_base = OTHER; note = 2'-O-methyl modified nucleoside
  modified_base 18: mod_base = OTHER; note = 2'-O-methyl modified nucleoside
  modified_base 19: mod_base = OTHER; note = 2'-O-methyl modified nucleoside with phosphorothioate linkage
  modified_base 20: mod_base = OTHER; note = 2'-O-methyl modified nucleoside with phosphorothioate linkage
  modified_base 21: mod_base = OTHER; note = 2'-O-methyl modified nucleoside
aaactatggttgtgtccgatt

SEQ ID NO: 12899 - RNA, 21 nt, synthetic construct
  source 1..21: mol_type = other RNA
  misc_feature 1: note = ETL17 moiety with a phosphorothioate linkage
  modified_base 1: mod_base = OTHER; note = 2'-O-methyl modified nucleoside
  modified_base 2: mod_base = OTHER; note = 2'-O-methyl modified nucleoside
  modified_base 3: mod_base = OTHER; note = 2'-O-methyl modified nucleoside
  modified_base 4: mod_base = OTHER; note = 2'-O-methyl modified nucleoside
  modified_base 5: mod_base = OTHER; note = 2'-O-methyl modified nucleoside
  modified_base 6: mod_base = OTHER; note = 2'-fluoro-modified nucleoside
  modified_base 7: mod_base = OTHER; note = 2'-O-methyl modified nucleoside
  modified_base 8: mod_base = OTHER; note = 2'-fluoro-modified nucleoside
  modified_base 9: mod_base = OTHER; note = 2'-fluoro-modified nucleoside
  modified_base 10: mod_base = OTHER; note = 2'-O-methyl modified nucleoside
  modified_base 11: mod_base = OTHER; note = 2'-O-methyl modified nucleoside
  modified_base 12: mod_base = OTHER; note = 2'-O-methyl modified nucleoside
  modified_base 13: mod_base = OTHER; note = 2'-O-methyl modified nucleoside
  modified_base 14: mod_base = OTHER; note = 2'-O-methyl modified nucleoside
  modified_base 15: mod_base = OTHER; note = 2'-O-methyl modified nucleoside
  modified_base 16: mod_base = OTHER; note = 2'-O-methyl modified nucleoside
  modified_base 17: mod_base = OTHER; note = 2'-O-methyl modified nucleoside
  modified_base 18: mod_base = OTHER; note = 2'-O-methyl modified nucleoside
  modified_base 19: mod_base = OTHER; note = 2'-O-methyl modified nucleoside with phosphorothioate linkage
  modified_base 20: mod_base = OTHER; note = 2'-O-methyl modified nucleoside with phosphorothioate linkage
  modified_base 21: mod_base = OTHER; note = 2'-O-methyl modified nucleoside
aaactatggttgtgtccgatt

SEQ ID NO: 12900 - RNA, 21 nt, synthetic construct
  source 1..21: mol_type = other RNA
  misc_feature 1: note = ETL17 moiety with a phosphorothioate linkage
  modified_base 1: mod_base = OTHER; note = 2'-O-methyl modified nucleoside
  modified_base 2: mod_base = OTHER; note = 2'-O-methyl modified nucleoside
  modified_base 3: mod_base = OTHER; note = 2'-O-methyl modified nucleoside
  modified_base 4: mod_base = OTHER; note = 2'-O-methyl modified nucleoside
  modified_base 5: mod_base = OTHER; note = 2'-methoxy ethyl thymidine
  modified_base 6: mod_base = OTHER; note = 2'-fluoro-modified nucleoside
  modified_base 7: mod_base = OTHER; note = 2'-fluoro-modified nucleoside
  modified_base 8: mod_base = OTHER; note = 2'-fluoro-modified nucleoside
  modified_base 9: mod_base = OTHER; note = 2'-fluoro-modified nucleoside
  modified_base 10: mod_base = OTHER; note = 2'-O-methyl modified nucleoside
  modified_base 11: mod_base = OTHER; note = 2'-O-methyl modified nucleoside
  modified_base 12: mod_base = OTHER; note = 2'-O-methyl modified nucleoside
  modified_base 13: mod_base = OTHER; note = 2'-methoxy ethyl thymidine
  modified_base 14: mod_base = OTHER; note = 2'-O-methyl modified nucleoside
  modified_base 15: mod_base = OTHER; note = 2'-O-methyl modified nucleoside
  modified_base 16: mod_base = OTHER; note = 2'-O-methyl modified nucleoside
  modified_base 17: mod_base = OTHER; note = 2'-O-methyl modified nucleoside
  modified_base 18: mod_base = OTHER; note = 2'-O-methyl modified nucleoside
  modified_base 19: mod_base = OTHER; note = 2'-O-methyl modified nucleoside with phosphorothioate linkage
  modified_base 20: mod_base = OTHER; note = 2'-O-methyl modified nucleoside with phosphorothioate linkage
  modified_base 21: mod_base = OTHER; note = 2'-O-methyl modified nucleoside
aaactatggttgtgtccgatt

SEQ ID NO: 12901 - RNA, 21 nt, synthetic construct
  source 1..21: mol_type = other RNA
  misc_feature 1: note = ETL17 moiety with a phosphorothioate linkage
  modified_base 1: mod_base = OTHER; note = 2'-O-methyl modified nucleoside
  modified_base 2: mod_base = OTHER; note = 2'-O-methyl modified nucleoside
  modified_base 3: mod_base = OTHER; note = 2'-O-methyl modified nucleoside
  modified_base 4: mod_base = OTHER; note = 2'-O-methyl modified nucleoside
  modified_base 5: mod_base = OTHER; note = 2'-O-methyl modified nucleoside
  modified_base 6: mod_base = OTHER; note = 2'-O-methyl modified nucleoside
  modified_base 7: mod_base = OTHER; note = 2'-O-methyl modified nucleoside
  modified_base 8: mod_base = OTHER; note = 2'-fluoro-modified nucleoside
  modified_base 9: mod_base = OTHER; note = 2'-fluoro-modified nucleoside
  modified_base 10: mod_base = OTHER; note = 2'-fluoro-modified nucleoside
  modified_base 11: mod_base = OTHER; note = 2'-fluoro-modified nucleoside
  modified_base 12: mod_base = OTHER; note = 2'-O-methyl modified nucleoside
  modified_base 13: mod_base = OTHER; note = 2'-O-methyl modified nucleoside
  modified_base 14: mod_base = OTHER; note = 2'-O-methyl modified nucleoside
  modified_base 15: mod_base = OTHER; note = 2'-O-methyl modified nucleoside
  modified_base 16: mod_base = OTHER; note = 2'-O-methyl modified nucleoside
  modified_base 17: mod_base = OTHER; note = 2'-O-methyl modified nucleoside
  modified_base 18: mod_base = OTHER; note = 2'-O-methyl modified nucleoside
  modified_base 19: mod_base = OTHER; note = 2'-O-methyl modified nucleoside with phosphorothioate linkage
  modified_base 20: mod_base = OTHER; note = 2'-O-methyl modified nucleoside with phosphorothioate linkage
  modified_base 21: mod_base = OTHER; note = 2'-O-methyl modified nucleoside
tgttattagaatgttacgatt

SEQ ID NO: 12902 - RNA, 21 nt, synthetic construct
  source 1..21: mol_type = other RNA
  misc_feature 1: note = ETL17 moiety with a phosphorothioate linkage
  modified_base 1: mod_base = OTHER; note = 2'-O-methyl modified nucleoside
  modified_base 2: mod_base = OTHER; note = 2'-O-methyl modified nucleoside
  modified_base 3: mod_base = OTHER; note = 2'-O-methyl modified nucleoside
  modified_base 4: mod_base = OTHER; note = 2'-O-methyl modified nucleoside
  modified_base 5: mod_base = OTHER; note = 2'-fluoro-modified nucleoside
  modified_base 6: mod_base = OTHER; note = 2'-O-methyl modified nucleoside
  modified_base 7: mod_base = OTHER; note = 2'-O-methyl modified nucleoside
  modified_base 8: mod_base = OTHER; note = 2'-fluoro-modified nucleoside
  modified_base 9: mod_base = OTHER; note = 2'-fluoro-modified nucleoside
  modified_base 10: mod_base = OTHER; note = 2'-O-methyl modified nucleoside
  modified_base 11: mod_base = OTHER; note = 2'-fluoro-modified nucleoside
  modified_base 12: mod_base = OTHER; note = 2'-O-methyl modified nucleoside
  modified_base 13: mod_base = OTHER; note = 2'-O-methyl modified nucleoside
  modified_base 14: mod_base = OTHER; note = 2'-O-methyl modified nucleoside
  modified_base 15: mod_base = OTHER; note = 2'-O-methyl modified nucleoside
  modified_base 16: mod_base = OTHER; note = 2'-O-methyl modified nucleoside
  modified_base 17: mod_base = OTHER; note = 2'-O-methyl modified nucleoside
  modified_base 18: mod_base = OTHER; note = 2'-O-methyl modified nucleoside
  modified_base 19: mod_base = OTHER; note = 2'-O-methyl modified nucleoside with phosphorothioate linkage
  modified_base 20: mod_base = OTHER; note = 2'-O-methyl modified nucleoside with phosphorothioate linkage
  modified_base 21: mod_base = OTHER; note = 2'-O-methyl modified nucleoside
tgttattagaatgttacgatt

SEQ ID NO: 12903 - RNA, 21 nt, synthetic construct
  source 1..21: mol_type = other RNA
  misc_feature 1: note = ETL17 moiety with a phosphorothioate linkage
  modified_base 1: mod_base = OTHER; note = 2'-O-methyl modified nucleoside
  modified_base 2: mod_base = OTHER; note = 2'-O-methyl modified nucleoside
  modified_base 3: mod_base = OTHER; note = 2'-O-methyl modified nucleoside
  modified_base 4: mod_base = OTHER; note = 2'-O-methyl modified nucleoside
  modified_base 5: mod_base = OTHER; note = 2'-fluoro-modified nucleoside
  modified_base 6: mod_base = OTHER; note = 2'-O-methyl modified nucleoside
  modified_base 7: mod_base = OTHER; note = 2'-O-methyl modified nucleoside
  modified_base 8: mod_base = OTHER; note = 2'-fluoro-modified nucleoside
  modified_base 9: mod_base = OTHER; note = 2'-fluoro-modified nucleoside
  modified_base 10: mod_base = OTHER; note = 2'-O-methyl modified nucleoside
  modified_base 11: mod_base = OTHER; note = 2'-fluoro-modified nucleoside
  modified_base 12: mod_base = OTHER; note = 2'-O-methyl modified nucleoside
  modified_base 13: mod_base = OTHER; note = 2'-O-methyl modified nucleoside
  modified_base 14: mod_base = OTHER; note = 2'-O-methyl modified nucleoside
  modified_base 15: mod_base = OTHER; note = 2'-O-methyl modified nucleoside
  modified_base 16: mod_base = OTHER; note = 2'-O-methyl modified nucleoside
  modified_base 17: mod_base = OTHER; note = 2'-O-methyl modified nucleoside
  modified_base 18: mod_base = OTHER; note = 2'-O-methyl modified nucleoside
  modified_base 19: mod_base = OTHER; note = 2'-O-methyl modified nucleoside with phosphorothioate linkage
  modified_base 20: mod_base = OTHER; note = 2'-O-methyl modified nucleoside with phosphorothioate linkage
  modified_base 21: mod_base = OTHER; note = 2'-O-methyl modified nucleoside
tgttattagaatgttacgatt

SEQ ID NO: 12904 - RNA, 21 nt, synthetic construct
  source 1..21: mol_type = other RNA
  misc_feature 1: note = ETL17 moiety with a phosphorothioate linkage
  modified_base 1: mod_base = OTHER; note = 2'-O-methyl modified nucleoside
  modified_base 2: mod_base = OTHER; note = 2'-O-methyl modified nucleoside
  modified_base 3: mod_base = OTHER; note = 2'-O-methyl modified nucleoside
  modified_base 4: mod_base = OTHER; note = 2'-O-methyl modified nucleoside
  modified_base 5: mod_base = OTHER; note = 2'-fluoro-modified nucleoside
  modified_base 6: mod_base = OTHER; note = 2'-O-methyl modified nucleoside
  modified_base 7: mod_base = OTHER; note = 2'-O-methyl modified nucleoside
  modified_base 8: mod_base = OTHER; note = 2'-fluoro-modified nucleoside
  modified_base 9: mod_base = OTHER; note = 2'-fluoro-modified nucleoside
  modified_base 10: mod_base = OTHER; note = 2'-O-methyl modified nucleoside
  modified_base 11: mod_base = OTHER; note = 2'-fluoro-modified nucleoside
  modified_base 12: mod_base = OTHER; note = 2'-O-methyl modified nucleoside
  modified_base 13: mod_base = OTHER; note = 2'-O-methyl modified nucleoside
  modified_base 14: mod_base = OTHER; note = 2'-O-methyl modified nucleoside
  modified_base 15: mod_base = OTHER; note = 2'-O-methyl modified nucleoside
  modified_base 16: mod_base = OTHER; note = 2'-O-methyl modified nucleoside
  modified_base 17: mod_base = OTHER; note = 2'-O-methyl modified nucleoside
  modified_base 18: mod_base = OTHER; note = 2'-O-methyl modified nucleoside
  modified_base 19: mod_base = OTHER; note = 2'-O-methyl modified nucleoside with phosphorothioate linkage
  modified_base 20: mod_base = OTHER; note = 2'-O-methyl modified nucleoside with phosphorothioate linkage
  modified_base 21: mod_base = OTHER; note = 2'-O-methyl modified nucleoside
tgttattagaatgttacgatt

SEQ ID NO: 12905 - RNA, 21 nt, synthetic construct
  source 1..21: mol_type = other RNA
  misc_feature 1: note = ETL17 moiety with a phosphorothioate linkage
  modified_base 1: mod_base = OTHER; note = 2'-O-methyl modified nucleoside
  modified_base 2: mod_base = OTHER; note = 2'-O-methyl modified nucleoside
  modified_base 3: mod_base = OTHER; note = 2'-O-methyl modified nucleoside
  modified_base 4: mod_base = OTHER; note = 2'-O-methyl modified nucleoside
  modified_base 5: mod_base = OTHER; note = 2'-fluoro-modified nucleoside
  modified_base 6: mod_base = OTHER; note = 2'-O-methyl modified nucleoside
  modified_base 7: mod_base = OTHER; note = 2'-O-methyl modified nucleoside
  modified_base 8: mod_base = OTHER; note = 2'-fluoro-modified nucleoside
  modified_base 9: mod_base = OTHER; note = 2'-fluoro-modified nucleoside
  modified_base 10: mod_base = OTHER; note = 2'-O-methyl modified nucleoside
  modified_base 11: mod_base = OTHER; note = 2'-fluoro-modified nucleoside
  modified_base 12: mod_base = OTHER; note = 2'-O-methyl modified nucleoside
  modified_base 13: mod_base = OTHER; note = 2'-O-methyl modified nucleoside
  modified_base 14: mod_base = OTHER; note = 2'-O-methyl modified nucleoside
  modified_base 15: mod_base = OTHER; note = 2'-O-methyl modified nucleoside
  modified_base 16: mod_base = OTHER; note = 2'-O-methyl modified nucleoside
  modified_base 17: mod_base = OTHER; note = 2'-O-methyl modified nucleoside
  modified_base 18: mod_base = OTHER; note = 2'-O-methyl modified nucleoside
  modified_base 19: mod_base = OTHER; note = 2'-O-methyl modified nucleoside with phosphorothioate linkage
  modified_base 20: mod_base = OTHER; note = 2'-O-methyl modified nucleoside with phosphorothioate linkage
  modified_base 21: mod_base = OTHER; note = 2'-O-methyl modified nucleoside
tgttattagaatgttacgatt

SEQ ID NO: 12906 - RNA, 21 nt, synthetic construct
  source 1..21: mol_type = other RNA
  misc_feature 1: note = ETL17 moiety with a phosphorothioate linkage
  modified_base 1: mod_base = OTHER; note = 2'-O-methyl modified nucleoside
  modified_base 2: mod_base = OTHER; note = 2'-O-methyl modified nucleoside
  modified_base 3: mod_base = OTHER; note = 2'-O-methyl modified nucleoside
  modified_base 4: mod_base = OTHER; note = 2'-O-methyl modified nucleoside
  modified_base 5: mod_base = OTHER; note = 2'-fluoro-modified nucleoside
  modified_base 6: mod_base = OTHER; note = 2'-O-methyl modified nucleoside
  modified_base 7: mod_base = OTHER; note = 2'-O-methyl modified nucleoside
  modified_base 8: mod_base = OTHER; note = 2'-fluoro-modified nucleoside
  modified_base 9: mod_base = OTHER; note = 2'-fluoro-modified nucleoside
  modified_base 10: mod_base = OTHER; note = 2'-O-methyl modified nucleoside
  modified_base 11: mod_base = OTHER; note = 2'-fluoro-modified nucleoside
  modified_base 12: mod_base = OTHER; note = 2'-O-methyl modified nucleoside
  modified_base 13: mod_base = OTHER; note = 2'-O-methyl modified nucleoside
  modified_base 14: mod_base = OTHER; note = 2'-O-methyl modified nucleoside
  modified_base 15: mod_base = OTHER; note = 2'-O-methyl modified nucleoside
  modified_base 16: mod_base = OTHER; note = 2'-O-methyl modified nucleoside
  modified_base 17: mod_base = OTHER; note = 2'-O-methyl modified nucleoside
  modified_base 18: mod_base = OTHER; note = 2'-O-methyl modified nucleoside
  modified_base 19: mod_base = OTHER; note = 2'-O-methyl modified nucleoside with phosphorothioate linkage
  modified_base 20: mod_base = OTHER; note = 2'-O-methyl modified nucleoside with phosphorothioate linkage
  modified_base 21: mod_base = OTHER; note = 2'-O-methyl modified nucleoside
tgttattagaatgttacgatt

SEQ ID NO: 12907 - RNA, 21 nt, synthetic construct
  source 1..21: mol_type = other RNA
  misc_feature 1: note = ETL17 moiety with a phosphorothioate linkage
  modified_base 1: mod_base = OTHER; note = 2'-O-methyl modified nucleoside
  modified_base 2: mod_base = OTHER; note = 2'-O-methyl modified nucleoside
  modified_base 3: mod_base = OTHER; note = 2'-O-methyl modified nucleoside
  modified_base 4: mod_base = OTHER; note = 2'-O-methyl modified nucleoside
  modified_base 5: mod_base = OTHER; note = 2'-fluoro-modified nucleoside
  modified_base 6: mod_base = OTHER; note = 2'-O-methyl modified nucleoside
  modified_base 7: mod_base = OTHER; note = 2'-O-methyl modified nucleoside
  modified_base 8: mod_base = OTHER; note = 2'-fluoro-modified nucleoside
  modified_base 9: mod_base = OTHER; note = 2'-fluoro-modified nucleoside
  modified_base 10: mod_base = OTHER; note = 2'-O-methyl modified nucleoside
  modified_base 11: mod_base = OTHER; note = 2'-fluoro-modified nucleoside
  modified_base 12: mod_base = OTHER; note = 2'-O-methyl modified nucleoside
  modified_base 13: mod_base = OTHER; note = 2'-O-methyl modified nucleoside
  modified_base 14: mod_base = OTHER; note = 2'-O-methyl modified nucleoside
  modified_base 15: mod_base = OTHER; note = 2'-O-methyl modified nucleoside
  modified_base 16: mod_base = OTHER; note = 2'-O-methyl modified nucleoside
  modified_base 17: mod_base = OTHER; note = 2'-O-methyl modified nucleoside
  modified_base 18: mod_base = OTHER; note = 2'-O-methyl modified nucleoside
  modified_base 19: mod_base = OTHER; note = 2'-O-methyl modified nucleoside with phosphorothioate linkage
  modified_base 20: mod_base = OTHER; note = 2'-O-methyl modified nucleoside with phosphorothioate linkage
  modified_base 21: mod_base = OTHER; note = 2'-O-methyl modified nucleoside
tgttattagaatgttacgatt

SEQ ID NO: 12908 - RNA, 21 nt, synthetic construct
  source 1..21: mol_type = other RNA
  misc_feature 1: note = ETL17 moiety with a phosphorothioate linkage
  modified_base 1: mod_base = OTHER; note = 2'-O-methyl modified nucleoside
  modified_base 2: mod_base = OTHER; note = 2'-O-methyl modified nucleoside
  modified_base 3: mod_base = OTHER; note = 2'-O-methyl modified nucleoside
  modified_base 4: mod_base = OTHER; note = 2'-O-methyl modified nucleoside
  modified_base 5: mod_base = OTHER; note = 2'-fluoro-modified nucleoside
  modified_base 6: mod_base = OTHER; note = 2'-O-methyl modified nucleoside
  modified_base 7: mod_base = OTHER; note = 2'-O-methyl modified nucleoside
  modified_base 8: mod_base = OTHER; note = 2'-fluoro-modified nucleoside
  modified_base 9: mod_base = OTHER; note = 2'-fluoro-modified nucleoside
  modified_base 10: mod_base = OTHER; note = 2'-O-methyl modified nucleoside
  modified_base 11: mod_base = OTHER; note = 2'-fluoro-modified nucleoside
  modified_base 12: mod_base = OTHER; note = 2'-O-methyl modified nucleoside
  modified_base 13: mod_base = OTHER; note = 2'-O-methyl modified nucleoside
  modified_base 14: mod_base = OTHER; note = 2'-O-methyl modified nucleoside
  modified_base 15: mod_base = OTHER; note = 2'-O-methyl modified nucleoside
  modified_base 16: mod_base = OTHER; note = 2'-O-methyl modified nucleoside
  modified_base 17: mod_base = OTHER; note = 2'-O-methyl modified nucleoside
  modified_base 18: mod_base = OTHER; note = 2'-O-methyl modified nucleoside
  modified_base 19: mod_base = OTHER; note = 2'-O-methyl modified nucleoside with phosphorothioate linkage
  modified_base 20: mod_base = OTHER; note = 2'-O-methyl modified nucleoside with phosphorothioate linkage
  modified_base 21: mod_base = OTHER; note = 2'-O-methyl modified nucleoside
tgttattagaatgttacgatt

SEQ ID NO: 12909 - RNA, 21 nt, synthetic construct
  source 1..21: mol_type = other RNA
  misc_feature 1: note = ETL17 moiety with a phosphorothioate linkage
  modified_base 1: mod_base = OTHER; note = 2'-O-methyl modified nucleoside
  modified_base 2: mod_base = OTHER; note = 2'-O-methyl modified nucleoside
  modified_base 3: mod_base = OTHER; note = 2'-O-methyl modified nucleoside
  modified_base 4: mod_base = OTHER; note = 2'-O-methyl modified nucleoside
  modified_base 5: mod_base = OTHER; note = 2'-fluoro-modified nucleoside
  modified_base 6: mod_base = OTHER; note = 2'-O-methyl modified nucleoside
  modified_base 7: mod_base = OTHER; note = 2'-O-methyl modified nucleoside
  modified_base 8: mod_base = OTHER; note = 2'-fluoro-modified nucleoside
  modified_base 9: mod_base = OTHER; note = 2'-fluoro-modified nucleoside
  modified_base 10: mod_base = OTHER; note = 2'-O-methyl modified nucleoside
  modified_base 11: mod_base = OTHER; note = 2'-fluoro-modified nucleoside
  modified_base 12: mod_base = OTHER; note = 2'-O-methyl modified nucleoside
  modified_base 13: mod_base = OTHER; note = 2'-O-methyl modified nucleoside
  modified_base 14: mod_base = OTHER; note = 2'-O-methyl modified nucleoside
  modified_base 15: mod_base = OTHER; note = 2'-O-methyl modified nucleoside
  modified_base 16: mod_base = OTHER; note = 2'-O-methyl modified nucleoside
  modified_base 17: mod_base = OTHER; note = 2'-O-methyl modified nucleoside
  modified_base 18: mod_base = OTHER; note = 2'-O-methyl modified nucleoside
  modified_base 19: mod_base = OTHER; note = 2'-O-methyl modified nucleoside with phosphorothioate linkage
  modified_base 20: mod_base = OTHER; note = 2'-O-methyl modified nucleoside with phosphorothioate linkage
  modified_base 21: mod_base = OTHER; note = 2'-O-methyl modified nucleoside
tgttattagaatgttacgatt

SEQ ID NO: 12910 - RNA, 21 nt, synthetic construct
  source 1..21: mol_type = other RNA
  misc_feature 1: note = ETL17 moiety with a phosphorothioate linkage
  modified_base 1: mod_base = OTHER; note = 2'-O-methyl modified nucleoside
  modified_base 2: mod_base = OTHER; note = 2'-O-methyl modified nucleoside
  modified_base 3: mod_base = OTHER; note = 2'-O-methyl modified nucleoside
  modified_base 4: mod_base = OTHER; note = 2'-O-methyl modified nucleoside
  modified_base 5: mod_base = OTHER; note = 2'-O-methyl modified nucleoside
  modified_base 6: mod_base = OTHER; note = 2'-fluoro-modified nucleoside
  modified_base 7: mod_base = OTHER; note = 2'-fluoro-modified nucleoside
  modified_base 8: mod_base = OTHER; note = 2'-fluoro-modified nucleoside
  modified_base 9: mod_base = OTHER; note = 2'-fluoro-modified nucleoside
  modified_base 10: mod_base = OTHER; note = 2'-O-methyl modified nucleoside
  modified_base 11: mod_base = OTHER; note = 2'-O-methyl modified nucleoside
  modified_base 12: mod_base = OTHER; note = 2'-O-methyl modified nucleoside
  modified_base 13: mod_base = OTHER; note = 2'-O-methyl modified nucleoside
  modified_base 14: mod_base = OTHER; note = 2'-O-methyl modified nucleoside
  modified_base 15: mod_base = OTHER; note = 2'-O-methyl modified nucleoside
  modified_base 16: mod_base = OTHER; note = 2'-O-methyl modified nucleoside
  modified_base 17: mod_base = OTHER; note = 2'-O-methyl modified nucleoside
  modified_base 18: mod_base = OTHER; note = 2'-O-methyl modified nucleoside
  modified_base 19: mod_base = OTHER; note = 2'-O-methyl modified nucleoside with phosphorothioate linkage
  modified_base 20: mod_base = OTHER; note = 2'-O-methyl modified nucleoside with phosphorothioate linkage
  modified_base 21: mod_base = OTHER; note = 2'-O-methyl modified nucleoside
tggaatctcctatgatcgatt

SEQ ID NO: 12911 - RNA, 21 nt, synthetic construct
  source 1..21: mol_type = other RNA
  misc_feature 1: note = ETL17 moiety with a phosphorothioate linkage
  modified_base 1: mod_base = OTHER; note = 2'-O-methyl modified nucleoside
  modified_base 2: mod_base = OTHER; note = 2'-O-methyl modified nucleoside
  modified_base 3: mod_base = OTHER; note = 2'-O-methyl modified nucleoside
  modified_base 4: mod_base = OTHER; note = 2'-O-methyl modified nucleoside
  modified_base 5: mod_base = OTHER; note = 2'-O-methyl modified nucleoside
  modified_base 6: mod_base = OTHER; note = 2'-fluoro-modified nucleoside
  modified_base 7: mod_base = OTHER; note = 2'-fluoro-modified nucleoside
  modified_base 8: mod_base = OTHER; note = 2'-O-methyl modified nucleoside
  modified_base 9: mod_base = OTHER; note = 2'-fluoro-modified nucleoside
  modified_base 10: mod_base = OTHER; note = 2'-fluoro-modified nucleoside
  modified_base 11: mod_base = OTHER; note = 2'-O-methyl modified nucleoside
  modified_base 12: mod_base = OTHER; note = 2'-O-methyl modified nucleoside
  modified_base 13: mod_base = OTHER; note = 2'-O-methyl modified nucleoside
  modified_base 14: mod_base = OTHER; note = 2'-O-methyl modified nucleoside
  modified_base 15: mod_base = OTHER; note = 2'-O-methyl modified nucleoside
  modified_base 16: mod_base = OTHER; note = 2'-O-methyl modified nucleoside
  modified_base 17: mod_base = OTHER; note = 2'-O-methyl modified nucleoside
  modified_base 18: mod_base = OTHER; note = 2'-O-methyl modified nucleoside
  modified_base 19: mod_base = OTHER; note = 2'-O-methyl modified nucleoside with phosphorothioate linkage
  modified_base 20: mod_base = OTHER; note = 2'-O-methyl modified nucleoside with phosphorothioate linkage
  modified_base 21: mod_base = OTHER; note = 2'-O-methyl modified nucleoside
tggaatctcctatgatcgatt

SEQ ID NO: 12912 - RNA, 21 nt, synthetic construct
  source 1..21: mol_type = other RNA
  misc_feature 1: note = ETL17 moiety with a phosphorothioate linkage
  modified_base 1: mod_base = OTHER; note = 2'-O-methyl modified nucleoside
  modified_base 2: mod_base = OTHER; note = 2'-O-methyl modified nucleoside
  modified_base 3: mod_base = OTHER; note = 2'-O-methyl modified nucleoside
  modified_base 4: mod_base = OTHER; note = 2'-O-methyl modified nucleoside
  modified_base 5: mod_base = OTHER; note = 2'-O-methyl modified nucleoside
  modified_base 6: mod_base = OTHER; note = 2'-fluoro-modified nucleoside
  modified_base 7: mod_base = OTHER; note = 2'-fluoro-modified nucleoside
  modified_base 8: mod_base = OTHER; note = 2'-O-methyl modified nucleoside
  modified_base 9: mod_base = OTHER; note = 2'-fluoro-modified nucleoside
  modified_base 10: mod_base = OTHER; note = 2'-fluoro-modified nucleoside
  modified_base 11: mod_base = OTHER; note = 2'-O-methyl modified nucleoside
  modified_base 12: mod_base = OTHER; note = 2'-O-methyl modified nucleoside
  modified_base 13: mod_base = OTHER; note = 2'-O-methyl modified nucleoside
  modified_base 14: mod_base = OTHER; note = 2'-O-methyl modified nucleoside
  modified_base 15: mod_base = OTHER; note = 2'-O-methyl modified nucleoside
  modified_base 16: mod_base = OTHER; note = 2'-O-methyl modified nucleoside
  modified_base 17: mod_base = OTHER; note = 2'-O-methyl modified nucleoside
  modified_base 18: mod_base = OTHER; note = 2'-O-methyl modified nucleoside
  modified_base 19: mod_base = OTHER; note = 2'-O-methyl modified nucleoside with phosphorothioate linkage
  modified_base 20: mod_base = OTHER; note = 2'-O-methyl modified nucleoside with phosphorothioate linkage
  modified_base 21: mod_base = OTHER; note = 2'-O-methyl modified nucleoside
tggaatctcctatgatcgatt

SEQ ID NO: 12913 - RNA, 21 nt, synthetic construct
  source 1..21: mol_type = other RNA
  misc_feature 1: note = ETL17 moiety with a phosphorothioate linkage
  modified_base 1: mod_base = OTHER; note = 2'-O-methyl modified nucleoside
  modified_base 2: mod_base = OTHER; note = 2'-O-methyl modified nucleoside
  modified_base 3: mod_base = OTHER; note = 2'-O-methyl modified nucleoside
  modified_base 4: mod_base = OTHER; note = 2'-O-methyl modified nucleoside
  modified_base 5: mod_base = OTHER; note = 2'-O-methyl modified nucleoside
  modified_base 6: mod_base = OTHER; note = 2'-fluoro-modified nucleoside
  modified_base 7: mod_base = OTHER; note = 2'-fluoro-modified nucleoside
  modified_base 8: mod_base = OTHER; note = 2'-O-methyl modified nucleoside
  modified_base 9: mod_base = OTHER; note = 2'-fluoro-modified nucleoside
  modified_base 10: mod_base = OTHER; note = 2'-fluoro-modified nucleoside
  modified_base 11: mod_base = OTHER; note = 2'-O-methyl modified nucleoside
  modified_base 12: mod_base = OTHER; note = 2'-O-methyl modified nucleoside
  modified_base 13: mod_base = OTHER; note = 2'-O-methyl modified nucleoside
  modified_base 14: mod_base = OTHER; note = 2'-O-methyl modified nucleoside
  modified_base 15: mod_base = OTHER; note = 2'-O-methyl modified nucleoside
  modified_base 16: mod_base = OTHER; note = 2'-O-methyl modified nucleoside
  modified_base 17: mod_base = OTHER; note = 2'-O-methyl modified nucleoside
  modified_base 18: mod_base = OTHER; note = 2'-O-methyl modified nucleoside
  modified_base 19: mod_base = OTHER; note = 2'-O-methyl modified nucleoside with phosphorothioate linkage
  modified_base 20: mod_base = OTHER; note = 2'-O-methyl modified nucleoside with phosphorothioate linkage
  modified_base 21: mod_base = OTHER; note = 2'-O-methyl modified nucleoside
tggaatctcctatgatcgatt

SEQ ID NO: 12914 - RNA, 21 nt, synthetic construct
  source 1..21: mol_type = other RNA
  misc_feature 1: note = ETL17 moiety with a phosphorothioate linkage
  modified_base 1: mod_base = OTHER; note = 2'-O-methyl modified nucleoside
  modified_base 2: mod_base = OTHER; note = 2'-O-methyl modified nucleoside
  modified_base 3: mod_base = OTHER; note = 2'-O-methyl modified nucleoside
  modified_base 4: mod_base = OTHER; note = 2'-O-methyl modified nucleoside
  modified_base 5: mod_base = OTHER; note = 2'-O-methyl modified nucleoside
  modified_base 6: mod_base = OTHER; note = 2'-fluoro-modified nucleoside
  modified_base 7: mod_base = OTHER; note = 2'-fluoro-modified nucleoside
  modified_base 8: mod_base = OTHER; note = 2'-O-methyl modified nucleoside
  modified_base 9: mod_base = OTHER; note = 2'-fluoro-modified nucleoside
  modified_base 10: mod_base = OTHER; note = 2'-fluoro-modified nucleoside
  modified_base 11: mod_base = OTHER; note = 2'-O-methyl modified nucleoside
  modified_base 12: mod_base = OTHER; note = 2'-O-methyl modified nucleoside
  modified_base 13: mod_base = OTHER; note = 2'-O-methyl modified nucleoside
  modified_base 14: mod_base = OTHER; note = 2'-O-methyl modified nucleoside
  modified_base 15: mod_base = OTHER; note = 2'-O-methyl modified nucleoside
  modified_base 16: mod_base = OTHER; note = 2'-O-methyl modified nucleoside
  modified_base 17: mod_base = OTHER; note = 2'-O-methyl modified nucleoside
  modified_base 18: mod_base = OTHER; note = 2'-O-methyl modified nucleoside
  modified_base 19: mod_base = OTHER; note = 2'-O-methyl modified nucleoside with phosphorothioate linkage
  modified_base 20: mod_base = OTHER; note = 2'-O-methyl modified nucleoside with phosphorothioate linkage
  modified_base 21: mod_base = OTHER; note = 2'-O-methyl modified nucleoside
tggaatctcctatgatcgatt

SEQ ID NO: 12915 - RNA, 21 nt, synthetic construct
  source 1..21: mol_type = other RNA
  misc_feature 1: note = ETL17 moiety with a phosphorothioate linkage
  modified_base 1: mod_base = OTHER; note = 2'-O-methyl modified nucleoside
  modified_base 2: mod_base = OTHER; note = 2'-O-methyl modified nucleoside
  modified_base 3: mod_base = OTHER; note = 2'-O-methyl modified nucleoside
  modified_base 4: mod_base = OTHER; note = 2'-O-methyl modified nucleoside
  modified_base 5: mod_base = OTHER; note = 2'-O-methyl modified nucleoside
  modified_base 6: mod_base = OTHER; note = 2'-fluoro-modified nucleoside
  modified_base 7: mod_base = OTHER; note = 2'-fluoro-modified nucleoside
  modified_base 8: mod_base = OTHER; note = 2'-O-methyl modified nucleoside
  modified_base 9: mod_base = OTHER; note = 2'-fluoro-modified nucleoside
  modified_base 10: mod_base = OTHER; note = 2'-fluoro-modified nucleoside
  modified_base 11: mod_base = OTHER; note = 2'-O-methyl modified nucleoside
  modified_base 12: mod_base = OTHER; note = 2'-O-methyl modified nucleoside
  modified_base 13: mod_base = OTHER; note = 2'-O-methyl modified nucleoside
  modified_base 14: mod_base = OTHER; note = 2'-O-methyl modified nucleoside
  modified_base 15: mod_base = OTHER; note = 2'-O-methyl modified nucleoside
  modified_base 16: mod_base = OTHER; note = 2'-O-methyl modified nucleoside
  modified_base 17: mod_base = OTHER; note = 2'-O-methyl modified nucleoside
  modified_base 18: mod_base = OTHER; note = 2'-O-methyl modified nucleoside
  modified_base 19: mod_base = OTHER; note = 2'-O-methyl modified nucleoside with phosphorothioate linkage
  modified_base 20: mod_base = OTHER; note = 2'-O-methyl modified nucleoside with phosphorothioate linkage
  modified_base 21: mod_base = OTHER; note = 2'-O-methyl modified nucleoside
tggaatctcctatgatcgatt

SEQ ID NO: 12916 - RNA, 21 nt, synthetic construct
  source 1..21: mol_type = other RNA
  misc_feature 1: note = ETL17 moiety with a phosphorothioate linkage
  modified_base 1: mod_base = OTHER; note = 2'-O-methyl modified nucleoside
  modified_base 2: mod_base = OTHER; note = 2'-O-methyl modified nucleoside
  modified_base 3: mod_base = OTHER; note = 2'-O-methyl modified nucleoside
  modified_base 4: mod_base = OTHER; note = 2'-O-methyl modified nucleoside
  modified_base 5: mod_base = OTHER; note = 2'-O-methyl modified nucleoside
  modified_base 6: mod_base = OTHER; note = 2'-fluoro-modified nucleoside
  modified_base 7: mod_base = OTHER; note = 2'-fluoro-modified nucleoside
  modified_base 8: mod_base = OTHER; note = 2'-O-methyl modified nucleoside
  modified_base 9: mod_base = OTHER; note = 2'-fluoro-modified nucleoside
  modified_base 10: mod_base = OTHER; note = 2'-fluoro-modified nucleoside
  modified_base 11: mod_base = OTHER; note = 2'-O-methyl modified nucleoside
  modified_base 12: mod_base = OTHER; note = 2'-O-methyl modified nucleoside
  modified_base 13: mod_base = OTHER; note = 2'-O-methyl modified nucleoside
  modified_base 14: mod_base = OTHER; note = 2'-O-methyl modified nucleoside
  modified_base 15: mod_base = OTHER; note = 2'-O-methyl modified nucleoside
  modified_base 16: mod_base = OTHER; note = 2'-O-methyl modified nucleoside
  modified_base 17: mod_base = OTHER; note = 2'-O-methyl modified nucleoside
  modified_base 18: mod_base = OTHER; note = 2'-O-methyl modified nucleoside
  modified_base 19: mod_base = OTHER; note = 2'-O-methyl modified nucleoside with phosphorothioate linkage
  modified_base 20: mod_base = OTHER; note = 2'-O-methyl modified nucleoside with phosphorothioate linkage
  modified_base 21: mod_base = OTHER; note = 2'-O-methyl modified nucleoside
tggaatctcctatgatcgatt

SEQ ID NO: 12917 - RNA, 21 nt, synthetic construct
  source 1..21: mol_type = other RNA
  misc_feature 1: note = ETL17 moiety with a phosphorothioate linkage
  modified_base 1: mod_base = OTHER; note = 2'-O-methyl modified nucleoside
  modified_base 2: mod_base = OTHER; note = 2'-O-methyl modified nucleoside
  modified_base 3: mod_base = OTHER; note = 2'-O-methyl modified nucleoside
  modified_base 4: mod_base = OTHER; note = 2'-O-methyl modified nucleoside
  modified_base 5: mod_base = OTHER; note = 2'-O-methyl modified nucleoside
  modified_base 6: mod_base = OTHER; note = 2'-fluoro-modified nucleoside
  modified_base 7: mod_base = OTHER; note = 2'-fluoro-modified nucleoside
  modified_base 8: mod_base = OTHER; note = 2'-O-methyl modified nucleoside
  modified_base 9: mod_base = OTHER; note = 2'-fluoro-modified nucleoside
  modified_base 10: mod_base = OTHER; note = 2'-fluoro-modified nucleoside
  modified_base 11: mod_base = OTHER; note = 2'-O-methyl modified nucleoside
  modified_base 12: mod_base = OTHER; note = 2'-O-methyl modified nucleoside
  modified_base 13: mod_base = OTHER; note = 2'-O-methyl modified nucleoside
  modified_base 14: mod_base = OTHER; note = 2'-O-methyl modified nucleoside
  modified_base 15: mod_base = OTHER; note = 2'-O-methyl modified nucleoside
  modified_base 16: mod_base = OTHER; note = 2'-O-methyl modified nucleoside
  modified_base 17: mod_base = OTHER; note = 2'-O-methyl modified nucleoside
  modified_base 18: mod_base = OTHER; note = 2'-O-methyl modified nucleoside
  modified_base 19: mod_base = OTHER; note = 2'-O-methyl modified nucleoside with phosphorothioate linkage
  modified_base 20: mod_base = OTHER; note = 2'-O-methyl modified nucleoside with phosphorothioate linkage
  modified_base 21: mod_base = OTHER; note = 2'-O-methyl modified nucleoside
tggaatctcctatgatcgatt

SEQ ID NO: 12918 - RNA, 21 nt, synthetic construct
  source 1..21: mol_type = other RNA
  misc_feature 1: note = ETL17 moiety with a phosphorothioate linkage
  modified_base 1: mod_base = OTHER; note = 2'-O-methyl modified nucleoside
  modified_base 2: mod_base = OTHER; note = 2'-O-methyl modified nucleoside
  modified_base 3: mod_base = OTHER; note = 2'-O-methyl modified nucleoside
  modified_base 4: mod_base = OTHER; note = 2'-O-methyl modified nucleoside
  modified_base 5: mod_base = OTHER; note = 2'-O-methyl modified nucleoside
  modified_base 6: mod_base = OTHER; note = 2'-O-methyl modified nucleoside
  modified_base 7: mod_base = OTHER; note = 2'-fluoro-modified nucleoside
  modified_base 8: mod_base = OTHER; note = 2'-O-methyl modified nucleoside
  modified_base 9: mod_base = OTHER; note = 2'-fluoro-modified nucleoside
  modified_base 10: mod_base = OTHER; note = 2'-fluoro-modified nucleoside
  modified_base 11: mod_base = OTHER; note = 2'-O-methyl modified nucleoside
  modified_base 12: mod_base = OTHER; note = 2'-O-methyl modified nucleoside
  modified_base 13: mod_base = OTHER; note = 2'-O-methyl modified nucleoside
  modified_base 14: mod_base = OTHER; note = 2'-O-methyl modified nucleoside
  modified_base 15: mod_base = OTHER; note = 2'-O-methyl modified nucleoside
  modified_base 16: mod_base = OTHER; note = 2'-O-methyl modified nucleoside
  modified_base 17: mod_base = OTHER; note = 2'-O-methyl modified nucleoside
  modified_base 18: mod_base = OTHER; note = 2'-O-methyl modified nucleoside
  modified_base 19: mod_base = OTHER; note = 2'-O-methyl modified nucleoside with phosphorothioate linkage
  modified_base 20: mod_base = OTHER; note = 2'-O-methyl modified nucleoside with phosphorothioate linkage
  modified_base 21: mod_base = OTHER; note = 2'-O-methyl modified nucleoside
attcactgctagcaagtcatt

SEQ ID NO: 12919 - RNA, 21 nt, synthetic construct
  source 1..21: mol_type = other RNA
  misc_feature 1: note = ETL17 moiety with a phosphorothioate linkage
  modified_base 1: mod_base = OTHER; note = 2'-O-methyl modified nucleoside
  modified_base 2: mod_base = OTHER; note = 2'-O-methyl modified nucleoside
  modified_base 3: mod_base = OTHER; note = 2'-O-methyl modified nucleoside
  modified_base 4: mod_base = OTHER; note = 2'-O-methyl modified nucleoside
  modified_base 5: mod_base = OTHER; note = 2'-O-methyl modified nucleoside
  modified_base 6: mod_base = OTHER; note = 2'-fluoro-modified nucleoside
  modified_base 7: mod_base = OTHER; note = 2'-fluoro-modified nucleoside
  modified_base 8: mod_base = OTHER; note = 2'-O-methyl modified nucleoside
  modified_base 9: mod_base = OTHER; note = 2'-fluoro-modified nucleoside
  modified_base 10: mod_base = OTHER; note = 2'-fluoro-modified nucleoside
  modified_base 11: mod_base = OTHER; note = 2'-O-methyl modified nucleoside
  modified_base 12: mod_base = OTHER; note = 2'-O-methyl modified nucleoside
  modified_base 13: mod_base = OTHER; note = 2'-O-methyl modified nucleoside
  modified_base 14: mod_base = OTHER; note = 2'-O-methyl modified nucleoside
  modified_base 15: mod_base = OTHER; note = 2'-O-methyl modified nucleoside
  modified_base 16: mod_base = OTHER; note = 2'-O-methyl modified nucleoside
  modified_base 17: mod_base = OTHER; note = 2'-O-methyl modified nucleoside
  modified_base 18: mod_base = OTHER; note = 2'-O-methyl modified nucleoside
  modified_base 19: mod_base = OTHER; note = 2'-O-methyl modified nucleoside with phosphorothioate linkage
  modified_base 20: mod_base = OTHER; note = 2'-O-methyl modified nucleoside with phosphorothioate linkage
  modified_base 21: mod_base = OTHER; note = 2'-O-methyl modified nucleoside
attcactgctagcaagtcatt

SEQ ID NO: 12920 - RNA, 21 nt, synthetic construct
  source 1..21: mol_type = other RNA
  misc_feature 1: note = ETL17 moiety with a phosphorothioate linkage
  modified_base 1: mod_base = OTHER; note = 2'-O-methyl modified nucleoside
  modified_base 2: mod_base = OTHER; note = 2'-O-methyl modified nucleoside
  modified_base 3: mod_base = OTHER; note = 2'-O-methyl modified nucleoside
  modified_base 4: mod_base = OTHER; note = 2'-O-methyl modified nucleoside
  modified_base 5: mod_base = OTHER; note = 2'-O-methyl modified nucleoside
  modified_base 6: mod_base = OTHER; note = 2'-fluoro-modified nucleoside
  modified_base 7: mod_base = OTHER; note = 2'-fluoro-modified nucleoside
  modified_base 8: mod_base = OTHER; note = 2'-O-methyl modified nucleoside
  modified_base 9: mod_base = OTHER; note = 2'-fluoro-modified nucleoside
  modified_base 10: mod_base = OTHER; note = 2'-fluoro-modified nucleoside
  modified_base 11: mod_base = OTHER; note = 2'-O-methyl modified nucleoside
  modified_base 12: mod_base = OTHER; note = 2'-O-methyl modified nucleoside
  modified_base 13: mod_base = OTHER; note = 2'-O-methyl modified nucleoside
  modified_base 14: mod_base = OTHER; note = 2'-O-methyl modified nucleoside
  modified_base 15: mod_base = OTHER; note = 2'-O-methyl modified nucleoside
  modified_base 16: mod_base = OTHER; note = 2'-O-methyl modified nucleoside
  modified_base 17: mod_base = OTHER; note = 2'-O-methyl modified nucleoside
  modified_base 18: mod_base = OTHER; note = 2'-O-methyl modified nucleoside
  modified_base 19: mod_base = OTHER; note = 2'-O-methyl modified nucleoside with phosphorothioate linkage
  modified_base 20: mod_base = OTHER; note = 2'-O-methyl modified nucleoside with phosphorothioate linkage
  modified_base 21: mod_base = OTHER; note = 2'-O-methyl modified nucleoside
attcactgctagcaagtcatt

SEQ ID NO: 12921 - RNA, 21 nt, synthetic construct
  source 1..21: mol_type = other RNA
  misc_feature 1: note = ETL17 moiety with a phosphorothioate linkage
  modified_base 1: mod_base = OTHER; note = 2'-O-methyl modified nucleoside
  modified_base 2: mod_base = OTHER; note = 2'-O-methyl modified nucleoside
  modified_base 3: mod_base = OTHER; note = 2'-O-methyl modified nucleoside
  modified_base 4: mod_base = OTHER; note = 2'-O-methyl modified nucleoside
  modified_base 5: mod_base = OTHER; note = 2'-O-methyl modified nucleoside
  modified_base 6: mod_base = OTHER; note = 2'-fluoro-modified nucleoside
  modified_base 7: mod_base = OTHER; note = 2'-fluoro-modified nucleoside
  modified_base 8: mod_base = OTHER; note = 2'-O-methyl modified nucleoside
  modified_base 9: mod_base = OTHER; note = 2'-fluoro-modified nucleoside
  modified_base 10: mod_base = OTHER; note = 2'-fluoro-modified nucleoside
  modified_base 11: mod_base = OTHER; note = 2'-O-methyl modified nucleoside
  modified_base 12: mod_base = OTHER; note = 2'-O-methyl modified nucleoside
  modified_base 13: mod_base = OTHER; note = 2'-O-methyl modified nucleoside
  modified_base 14: mod_base = OTHER; note = 2'-O-methyl modified nucleoside
  modified_base 15: mod_base = OTHER; note = 2'-O-methyl modified nucleoside
  modified_base 16: mod_base = OTHER; note = 2'-O-methyl modified nucleoside
  modified_base 17: mod_base = OTHER; note = 2'-O-methyl modified nucleoside
  modified_base 18: mod_base = OTHER; note = 2'-O-methyl modified nucleoside
  modified_base 19: mod_base = OTHER; note = 2'-O-methyl modified nucleoside with phosphorothioate linkage
  modified_base 20: mod_base = OTHER; note = 2'-O-methyl modified nucleoside with phosphorothioate linkage
  modified_base 21: mod_base = OTHER; note = 2'-O-methyl modified nucleoside
attcactgctagcaagtcatt

SEQ ID NO: 12922 - RNA, 21 nt, synthetic construct
  source 1..21: mol_type = other RNA
  misc_feature 1: note = ETL17 moiety with a phosphorothioate linkage
  modified_base 1: mod_base = OTHER; note = 2'-O-methyl modified nucleoside
  modified_base 2: mod_base = OTHER; note = 2'-O-methyl modified nucleoside
  modified_base 3: mod_base = OTHER; note = 2'-O-methyl modified nucleoside
  modified_base 4: mod_base = OTHER; note = 2'-O-methyl modified nucleoside
  modified_base 5: mod_base = OTHER; note = 2'-O-methyl modified nucleoside
  modified_base 6: mod_base = OTHER; note = 2'-fluoro-modified nucleoside
  modified_base 7: mod_base = OTHER; note = 2'-fluoro-modified nucleoside
  modified_base 8: mod_base = OTHER; note = 2'-O-methyl modified nucleoside
  modified_base 9: mod_base = OTHER; note = 2'-fluoro-modified nucleoside
  modified_base 10: mod_base = OTHER; note = 2'-fluoro-modified nucleoside
  modified_base 11: mod_base = OTHER; note = 2'-O-methyl modified nucleoside
  modified_base 12: mod_base = OTHER; note = 2'-O-methyl modified nucleoside
  modified_base 13: mod_base = OTHER; note = 2'-O-methyl modified nucleoside
  modified_base 14: mod_base = OTHER; note = 2'-O-methyl modified nucleoside
  modified_base 15: mod_base = OTHER; note = 2'-O-methyl modified nucleoside
  modified_base 16: mod_base = OTHER; note = 2'-O-methyl modified nucleoside
  modified_base 17: mod_base = OTHER; note = 2'-O-methyl modified nucleoside
  modified_base 18: mod_base = OTHER; note = 2'-O-methyl modified nucleoside
  modified_base 19: mod_base = OTHER; note = 2'-O-methyl modified nucleoside with phosphorothioate linkage
  modified_base 20: mod_base = OTHER; note = 2'-O-methyl modified nucleoside with phosphorothioate linkage
  modified_base 21: mod_base = OTHER; note = 2'-O-methyl modified nucleoside
attcactgctagcaagtcatt

SEQ ID NO: 12923 - RNA, 21 nt, synthetic construct
  source 1..21: mol_type = other RNA
  misc_feature 1: note = ETL17 moiety with a phosphorothioate linkage
  modified_base 1: mod_base = OTHER; note = 2'-O-methyl modified nucleoside
  modified_base 2: mod_base = OTHER; note = 2'-O-methyl modified nucleoside
  modified_base 3: mod_base = OTHER; note = 2'-O-methyl modified nucleoside
  modified_base 4: mod_base = OTHER; note = 2'-O-methyl modified nucleoside
  modified_base 5: mod_base = OTHER; note = 2'-O-methyl modified nucleoside
  modified_base 6: mod_base = OTHER; note = 2'-fluoro-modified nucleoside
  modified_base 7: mod_base = OTHER; note = 2'-fluoro-modified nucleoside
  modified_base 8: mod_base = OTHER; note = 2'-O-methyl modified nucleoside
  modified_base 9: mod_base = OTHER; note = 2'-fluoro-modified nucleoside
  modified_base 10: mod_base = OTHER; note = 2'-fluoro-modified nucleoside
  modified_base 11: mod_base = OTHER; note = 2'-O-methyl modified nucleoside
  modified_base 12: mod_base = OTHER; note = 2'-O-methyl modified nucleoside
  modified_base 13: mod_base = OTHER; note = 2'-O-methyl modified nucleoside
  modified_base 14: mod_base = OTHER; note = 2'-O-methyl modified nucleoside
  modified_base 15: mod_base = OTHER; note = 2'-O-methyl modified nucleoside
  modified_base 16: mod_base = OTHER; note = 2'-O-methyl modified nucleoside
  modified_base 17: mod_base = OTHER; note = 2'-O-methyl modified nucleoside
  modified_base 18: mod_base = OTHER; note = 2'-O-methyl modified nucleoside
  modified_base 19: mod_base = OTHER; note = 2'-O-methyl modified nucleoside with phosphorothioate linkage
  modified_base 20: mod_base = OTHER; note = 2'-O-methyl modified nucleoside with phosphorothioate linkage
  modified_base 21: mod_base = OTHER; note = 2'-O-methyl modified nucleoside
attcactgctagcaagtcatt

SEQ ID NO: 12924 - RNA, 21 nt, synthetic construct
  source 1..21: mol_type = other RNA
  misc_feature 1: note = ETL17 moiety with a phosphorothioate linkage
  modified_base 1: mod_base = OTHER; note = 2'-O-methyl modified nucleoside
  modified_base 2: mod_base = OTHER; note = 2'-O-methyl modified nucleoside
  modified_base 3: mod_base = OTHER; note = 2'-O-methyl modified nucleoside
  modified_base 4: mod_base = OTHER; note = 2'-O-methyl modified nucleoside
  modified_base 5: mod_base = OTHER; note = 2'-O-methyl modified nucleoside
  modified_base 6: mod_base = OTHER; note = 2'-fluoro-modified nucleoside
  modified_base 7: mod_base = OTHER; note = 2'-fluoro-modified nucleoside
  modified_base 8: mod_base = OTHER; note = 2'-O-methyl modified nucleoside
  modified_base 9: mod_base = OTHER; note = 2'-fluoro-modified nucleoside
  modified_base 10: mod_base = OTHER; note = 2'-fluoro-modified nucleoside
  modified_base 11: mod_base = OTHER; note = 2'-O-methyl modified nucleoside
  modified_base 12: mod_base = OTHER; note = 2'-O-methyl modified nucleoside
  modified_base 13: mod_base = OTHER; note = 2'-O-methyl modified nucleoside
  modified_base 14: mod_base = OTHER; note = 2'-O-methyl modified nucleoside
  modified_base 15: mod_base = OTHER; note = 2'-O-methyl modified nucleoside
  modified_base 16: mod_base = OTHER; note = 2'-O-methyl modified nucleoside
  modified_base 17: mod_base = OTHER; note = 2'-O-methyl modified nucleoside
  modified_base 18: mod_base = OTHER; note = 2'-O-methyl modified nucleoside
  modified_base 19: mod_base = OTHER; note = 2'-O-methyl modified nucleoside with phosphorothioate linkage
  modified_base 20: mod_base = OTHER; note = 2'-O-methyl modified nucleoside with phosphorothioate linkage
  modified_base 21: mod_base = OTHER; note = 2'-O-methyl modified nucleoside
attcactgctagcaagtcatt

SEQ ID NO: 12925 - RNA, 21 nt, synthetic construct
  source 1..21: mol_type = other RNA
  misc_feature 1: note = ETL17 moiety with a phosphorothioate linkage
  modified_base 1: mod_base = OTHER; note = 2'-O-methyl modified nucleoside
  modified_base 2: mod_base = OTHER; note = 2'-O-methyl modified nucleoside
  modified_base 3: mod_base = OTHER; note = 2'-O-methyl modified nucleoside
  modified_base 4: mod_base = OTHER; note = 2'-O-methyl modified nucleoside
  modified_base 5: mod_base = OTHER; note = 2'-O-methyl modified nucleoside
  modified_base 6: mod_base = OTHER; note = 2'-fluoro-modified nucleoside
  modified_base 7: mod_base = OTHER; note = 2'-fluoro-modified nucleoside
  modified_base 8: mod_base = OTHER; note = 2'-O-methyl modified nucleoside
  modified_base 9: mod_base = OTHER; note = 2'-fluoro-modified nucleoside
  modified_base 10: mod_base = OTHER; note = 2'-fluoro-modified nucleoside
  modified_base 11: mod_base = OTHER; note = 2'-O-methyl modified nucleoside
  modified_base 12: mod_base = OTHER; note = 2'-O-methyl modified nucleoside
  modified_base 13: mod_base = OTHER; note = 2'-O-methyl modified nucleoside
  modified_base 14: mod_base = OTHER; note = 2'-O-methyl modified nucleoside
  modified_base 15: mod_base = OTHER; note = 2'-O-methyl modified nucleoside
  modified_base 16: mod_base = OTHER; note = 2'-O-methyl modified nucleoside
  modified_base 17: mod_base = OTHER; note = 2'-O-methyl modified nucleoside
  modified_base 18: mod_base = OTHER; note = 2'-O-methyl modified nucleoside
  modified_base 19: mod_base = OTHER; note = 2'-O-methyl modified nucleoside with phosphorothioate linkage
  modified_base 20: mod_base = OTHER; note = 2'-O-methyl modified nucleoside with phosphorothioate linkage
  modified_base 21: mod_base = OTHER; note = 2'-O-methyl modified nucleoside
attcactgctagcaagtcatt

SEQ ID NO: 12926 - RNA, 21 nt, synthetic construct
  source 1..21: mol_type = other RNA
  misc_feature 1: note = ETL17 moiety with a phosphorothioate linkage
  modified_base 1: mod_base = OTHER; note = 2'-O-methyl modified nucleoside
  modified_base 2: mod_base = OTHER; note = 2'-O-methyl modified nucleoside
  modified_base 3: mod_base = OTHER; note = 2'-O-methyl modified nucleoside
  modified_base 4: mod_base = OTHER; note = 2'-O-methyl modified nucleoside
  modified_base 5: mod_base = OTHER; note = 2'-O-methyl modified nucleoside
  modified_base 6: mod_base = OTHER; note = 2'-fluoro-modified nucleoside
  modified_base 7: mod_base = OTHER; note = 2'-fluoro-modified nucleoside
  modified_base 8: mod_base = OTHER; note = 2'-O-methyl modified nucleoside
  modified_base 9: mod_base = OTHER; note = 2'-fluoro-modified nucleoside
  modified_base 10: mod_base = OTHER; note = 2'-fluoro-modified nucleoside
  modified_base 11: mod_base = OTHER; note = 2'-O-methyl modified nucleoside
  modified_base 12: mod_base = OTHER; note = 2'-O-methyl modified nucleoside
  modified_base 13: mod_base = OTHER; note = 2'-O-methyl modified nucleoside
  modified_base 14: mod_base = OTHER; note = 2'-O-methyl modified nucleoside
  modified_base 15: mod_base = OTHER; note = 2'-O-methyl modified nucleoside
  modified_base 16: mod_base = OTHER; note = 2'-O-methyl modified nucleoside
  modified_base 17: mod_base = OTHER; note = 2'-O-methyl modified nucleoside
  modified_base 18: mod_base = OTHER; note = 2'-O-methyl modified nucleoside
  modified_base 19: mod_base = OTHER; note = 2'-O-methyl modified nucleoside with phosphorothioate linkage
  modified_base 20: mod_base = OTHER; note = 2'-O-methyl modified nucleoside with phosphorothioate linkage
  modified_base 21: mod_base = OTHER; note = 2'-O-methyl modified nucleoside
attcactgctagcaagtcatt

SEQ ID NO: 12927 - DNA, 21 bp, synthetic construct
  source 1..21: mol_type = other DNA
  misc_feature 1: note = ETL17 moiety with a phosphorothioate linkage
  modified_base 1: mod_base = OTHER; note = 2'-O-methyl modified nucleoside
  modified_base 2: mod_base = OTHER; note = 2'-O-methyl modified nucleoside
  modified_base 3: mod_base = OTHER; note = 2'-O-methyl modified nucleoside
  modified_base 4: mod_base = OTHER; note = 2'-O-methyl modified nucleoside
  modified_base 5: mod_base = OTHER; note = 2'-fluoro-modified nucleoside
  modified_base 6: mod_base = OTHER; note = 2'-O-methyl modified nucleoside
  modified_base 8: mod_base = OTHER; note = 2'-O-methyl modified nucleoside
  modified_base 9: mod_base = OTHER; note = 2'-fluoro-modified nucleoside
  modified_base 10: mod_base = OTHER; note = 2'-O-methyl modified nucleoside
  modified_base 11: mod_base = OTHER; note = 2'-fluoro-modified nucleoside
  modified_base 12: mod_base = OTHER; note = 2'-O-methyl modified nucleoside
  modified_base 13: mod_base = OTHER; note = 2'-O-methyl modified nucleoside
  modified_base 14: mod_base = OTHER; note = 2'-O-methyl modified nucleoside
  modified_base 15: mod_base = OTHER; note = 2'-O-methyl modified nucleoside
  modified_base 16: mod_base = OTHER; note = 2'-O-methyl modified nucleoside
  modified_base 17: mod_base = OTHER; note = 2'-O-methyl modified nucleoside
  modified_base 18: mod_base = OTHER; note = 2'-O-methyl modified nucleoside
  modified_base 19: mod_base = OTHER; note = 2'-O-methyl modified nucleoside with phosphorothioate linkage
  modified_base 20: mod_base = OTHER; note = 2'-O-methyl modified nucleoside with phosphorothioate linkage
  modified_base 21: mod_base = OTHER; note = 2'-O-methyl modified nucleoside
  misc_feature 1..6: note = RNA
  misc_feature 7: note = DNA
  misc_feature 8..21: note = RNA
tccatgggcatatagttgatt

SEQ ID NO: 12928 - RNA, 21 nt, synthetic construct
  source 1..21: mol_type = other RNA
  misc_feature 1: note = ETL17 moiety with a phosphorothioate linkage
  modified_base 1: mod_base = OTHER; note = 2'-O-methyl modified nucleoside
  modified_base 2: mod_base = OTHER; note = 2'-O-methyl modified nucleoside
  modified_base 3: mod_base = OTHER; note = 2'-O-methyl modified nucleoside
  modified_base 4: mod_base = OTHER; note = 2'-O-methyl modified nucleoside
  modified_base 5: mod_base = OTHER; note = 2'-fluoro-modified nucleoside
  modified_base 6: mod_base = OTHER; note = 2'-O-methyl modified nucleoside
  modified_base 7: mod_base = OTHER; note = 2'-O-methyl modified nucleoside
  modified_base 8: mod_base = OTHER; note = 2'-O-methyl modified nucleoside
  modified_base 9: mod_base = OTHER; note = 2'-fluoro-modified nucleoside
  modified_base 10: mod_base = OTHER; note = 2'-O-methyl modified nucleoside
  modified_base 11: mod_base = OTHER; note = 2'-fluoro-modified nucleoside
  modified_base 12: mod_base = OTHER; note = 2'-O-methyl modified nucleoside
  modified_base 13: mod_base = OTHER; note = 2'-O-methyl modified nucleoside
  modified_base 14: mod_base = OTHER; note = 2'-O-methyl modified nucleoside
  modified_base 15: mod_base = OTHER; note = 2'-O-methyl modified nucleoside
  modified_base 16: mod_base = OTHER; note = 2'-O-methyl modified nucleoside
  modified_base 17: mod_base = OTHER; note = 2'-O-methyl modified nucleoside
  modified_base 18: mod_base = OTHER; note = 2'-O-methyl modified nucleoside
  modified_base 19: mod_base = OTHER; note = 2'-O-methyl modified nucleoside with phosphorothioate linkage
  modified_base 20: mod_base = OTHER; note = 2'-O-methyl modified nucleoside with phosphorothioate linkage
  modified_base 21: mod_base = OTHER; note = 2'-O-methyl modified nucleoside
tccatgggcatatagttgatt

SEQ ID NO: 12929 - RNA, 21 nt, synthetic construct
  source 1..21: mol_type = other RNA
  misc_feature 1: note = ETL17 moiety with a phosphorothioate linkage
  modified_base 1: mod_base = OTHER; note = 2'-O-methyl modified nucleoside
  modified_base 2: mod_base = OTHER; note = 2'-O-methyl modified nucleoside
  modified_base 3: mod_base = OTHER; note = 2'-O-methyl modified nucleoside
  modified_base 4: mod_base = OTHER; note = 2'-O-methyl modified nucleoside
  modified_base 5: mod_base = OTHER; note = 2'-fluoro-modified nucleoside
  modified_base 6: mod_base = OTHER; note = 2'-O-methyl modified nucleoside
  modified_base 7: mod_base = OTHER; note = 2'-O-methyl modified nucleoside
  modified_base 8: mod_base = OTHER; note = 2'-O-methyl modified nucleoside
  modified_base 9: mod_base = OTHER; note = 2'-fluoro-modified nucleoside
  modified_base 10: mod_base = OTHER; note = 2'-O-methyl modified nucleoside
  modified_base 11: mod_base = OTHER; note = 2'-fluoro-modified nucleoside
  modified_base 12: mod_base = OTHER; note = 2'-O-methyl modified nucleoside
  modified_base 13: mod_base = OTHER; note = 2'-O-methyl modified nucleoside
  modified_base 14: mod_base = OTHER; note = 2'-O-methyl modified nucleoside
  modified_base 15: mod_base = OTHER; note = 2'-O-methyl modified nucleoside
  modified_base 16: mod_base = OTHER; note = 2'-O-methyl modified nucleoside
  modified_base 17: mod_base = OTHER; note = 2'-O-methyl modified nucleoside
  modified_base 18: mod_base = OTHER; note = 2'-O-methyl modified nucleoside
  modified_base 19: mod_base = OTHER; note = 2'-O-methyl modified nucleoside with phosphorothioate linkage
  modified_base 20: mod_base = OTHER; note = 2'-O-methyl modified nucleoside with phosphorothioate linkage
  modified_base 21: mod_base = OTHER; note = 2'-O-methyl modified nucleoside
tccatgggcatatagttgatt

SEQ ID NO: 12930 - RNA, 21 nt, synthetic construct
  source 1..21: mol_type = other RNA
  misc_feature 1: note = ETL17 moiety with a phosphorothioate linkage
  modified_base 1: mod_base = OTHER; note = 2'-O-methyl modified nucleoside
  modified_base 2: mod_base = OTHER; note = 2'-O-methyl modified nucleoside
  modified_base 3: mod_base = OTHER; note = 2'-O-methyl modified nucleoside
  modified_base 4: mod_base = OTHER; note = 2'-O-methyl modified nucleoside
  modified_base 5: mod_base = OTHER; note = 2'-fluoro-modified nucleoside
  modified_base 6: mod_base = OTHER; note = 2'-O-methyl modified nucleoside
  modified_base 7: mod_base = OTHER; note = 2'-O-methyl modified nucleoside
  modified_base 8: mod_base = OTHER; note = 2'-O-methyl modified nucleoside
  modified_base 9: mod_base = OTHER; note = 2'-fluoro-modified nucleoside
  modified_base 10: mod_base = OTHER; note = 2'-O-methyl modified nucleoside
  modified_base 11: mod_base = OTHER; note = 2'-fluoro-modified nucleoside
  modified_base 12: mod_base = OTHER; note = 2'-O-methyl modified nucleoside
  modified_base 13: mod_base = OTHER; note = 2'-O-methyl modified nucleoside
  modified_base 14: mod_base = OTHER; note = 2'-O-methyl modified nucleoside
  modified_base 15: mod_base = OTHER; note = 2'-O-methyl modified nucleoside
  modified_base 16: mod_base = OTHER; note = 2'-O-methyl modified nucleoside
  modified_base 17: mod_base = OTHER; note = 2'-O-methyl modified nucleoside
  modified_base 18: mod_base = OTHER; note = 2'-O-methyl modified nucleoside
  modified_base 19: mod_base = OTHER; note = 2'-O-methyl modified nucleoside with phosphorothioate linkage
  modified_base 20: mod_base = OTHER; note = 2'-O-methyl modified nucleoside with phosphorothioate linkage
  modified_base 21: mod_base = OTHER; note = 2'-O-methyl modified nucleoside
tccatgggcatatagttgatt

SEQ ID NO: 12931 - RNA, 21 nt, synthetic construct
  source 1..21: mol_type = other RNA
  misc_feature 1: note = ETL17 moiety with a phosphorothioate linkage
  modified_base 1: mod_base = OTHER; note = 2'-O-methyl modified nucleoside
  modified_base 2: mod_base = OTHER; note = 2'-O-methyl modified nucleoside
  modified_base 3: mod_base = OTHER; note = 2'-O-methyl modified nucleoside
  modified_base 4: mod_base = OTHER; note = 2'-O-methyl modified nucleoside
  modified_base 5: mod_base = OTHER; note = 2'-fluoro-modified nucleoside
  modified_base 6: mod_base = OTHER; note = 2'-O-methyl modified nucleoside
  modified_base 7: mod_base = OTHER; note = 2'-O-methyl modified nucleoside
  modified_base 8: mod_base = OTHER; note = 2'-O-methyl modified nucleoside
  modified_base 9: mod_base = OTHER; note = 2'-fluoro-modified nucleoside
  modified_base 10: mod_base = OTHER; note = 2'-O-methyl modified nucleoside
  modified_base 11: mod_base = OTHER; note = 2'-fluoro-modified nucleoside
  modified_base 12: mod_base = OTHER; note = 2'-O-methyl modified nucleoside
  modified_base 13: mod_base = OTHER; note = 2'-O-methyl modified nucleoside
  modified_base 14: mod_base = OTHER; note = 2'-O-methyl modified nucleoside
  modified_base 15: mod_base = OTHER; note = 2'-O-methyl modified nucleoside
  modified_base 16: mod_base = OTHER; note = 2'-O-methyl modified nucleoside
  modified_base 17: mod_base = OTHER; note = 2'-O-methyl modified nucleoside
  modified_base 18: mod_base = OTHER; note = 2'-O-methyl modified nucleoside
  modified_base 19: mod_base = OTHER; note = 2'-O-methyl modified nucleoside with phosphorothioate linkage
  modified_base 20: mod_base = OTHER; note = 2'-O-methyl modified nucleoside with phosphorothioate linkage
  modified_base 21: mod_base = OTHER; note = 2'-O-methyl modified nucleoside
tccatgggcatatagttgatt

SEQ ID NO: 12932 - RNA, 21 nt, synthetic construct
  source 1..21: mol_type = other RNA
  misc_feature 1: note = ETL17 moiety with a phosphorothioate linkage
  modified_base 1: mod_base = OTHER; note = 2'-O-methyl modified nucleoside
  modified_base 2: mod_base = OTHER; note = 2'-O-methyl modified nucleoside
  modified_base 3: mod_base = OTHER; note = 2'-O-methyl modified nucleoside
  modified_base 4: mod_base = OTHER; note = 2'-O-methyl modified nucleoside
  modified_base 5: mod_base = OTHER; note = 2'-fluoro-modified nucleoside
  modified_base 6: mod_base = OTHER; note = 2'-O-methyl modified nucleoside
  modified_base 7: mod_base = OTHER; note = 2'-O-methyl modified nucleoside
  modified_base 8: mod_base = OTHER; note = 2'-O-methyl modified nucleoside
  modified_base 9: mod_base = OTHER; note = 2'-fluoro-modified nucleoside
  modified_base 10: mod_base = OTHER; note = 2'-O-methyl modified nucleoside
  modified_base 11: mod_base = OTHER; note = 2'-fluoro-modified nucleoside
  modified_base 12: mod_base = OTHER; note = 2'-O-methyl modified nucleoside
  modified_base 13: mod_base = OTHER; note = 2'-O-methyl modified nucleoside
  modified_base 14: mod_base = OTHER; note = 2'-O-methyl modified nucleoside
  modified_base 15: mod_base = OTHER; note = 2'-O-methyl modified nucleoside
  modified_base 16: mod_base = OTHER; note = 2'-O-methyl modified nucleoside
  modified_base 17: mod_base = OTHER; note = 2'-O-methyl modified nucleoside
  modified_base 18: mod_base = OTHER; note = 2'-O-methyl modified nucleoside
  modified_base 19: mod_base = OTHER; note = 2'-O-methyl modified nucleoside with phosphorothioate linkage
  modified_base 20: mod_base = OTHER; note = 2'-O-methyl modified nucleoside with phosphorothioate linkage
  modified_base 21: mod_base = OTHER; note = 2'-O-methyl modified nucleoside
tccatgggcatatagttgatt

SEQ ID NO: 12933 - RNA, 21 nt, synthetic construct
  source 1..21: mol_type = other RNA
  misc_feature 1: note = ETL17 moiety with a phosphorothioate linkage
  modified_base 1: mod_base = OTHER; note = 2'-O-methyl modified nucleoside
  modified_base 2: mod_base = OTHER; note = 2'-O-methyl modified nucleoside
  modified_base 3: mod_base = OTHER; note = 2'-O-methyl modified nucleoside
  modified_base 4: mod_base = OTHER; note = 2'-O-methyl modified nucleoside
  modified_base 5: mod_base = OTHER; note = 2'-fluoro-modified nucleoside
  modified_base 6: mod_base = OTHER; note = 2'-O-methyl modified nucleoside
  modified_base 7: mod_base = OTHER; note = 2'-O-methyl modified nucleoside
  modified_base 8: mod_base = OTHER; note = 2'-O-methyl modified nucleoside
  modified_base 9: mod_base = OTHER; note = 2'-fluoro-modified nucleoside
  modified_base 10: mod_base = OTHER; note = 2'-O-methyl modified nucleoside
  modified_base 11: mod_base = OTHER; note = 2'-fluoro-modified nucleoside
  modified_base 12: mod_base = OTHER; note = 2'-O-methyl modified nucleoside
  modified_base 13: mod_base = OTHER; note = 2'-O-methyl modified nucleoside
  modified_base 14: mod_base = OTHER; note = 2'-O-methyl modified nucleoside
  modified_base 15: mod_base = OTHER; note = 2'-O-methyl modified nucleoside
  modified_base 16: mod_base = OTHER; note = 2'-O-methyl modified nucleoside
  modified_base 17: mod_base = OTHER; note = 2'-O-methyl modified nucleoside
  modified_base 18: mod_base = OTHER; note = 2'-O-methyl modified nucleoside
  modified_base 19: mod_base = OTHER; note = 2'-O-methyl modified nucleoside with phosphorothioate linkage
  modified_base 20: mod_base = OTHER; note = 2'-O-methyl modified nucleoside with phosphorothioate linkage
  modified_base 21: mod_base = OTHER; note = 2'-O-methyl modified nucleoside
tccatgggcatatagttgatt

SEQ ID NO: 12934 - RNA, 21 nt, synthetic construct
  source 1..21: mol_type = other RNA
  misc_feature 1: note = ETL17 moiety with a phosphorothioate linkage
  modified_base 1: mod_base = OTHER; note = 2'-O-methyl modified nucleoside
  modified_base 2: mod_base = OTHER; note = 2'-O-methyl modified nucleoside
  modified_base 3: mod_base = OTHER; note = 2'-O-methyl modified nucleoside
  modified_base 4: mod_base = OTHER; note = 2'-O-methyl modified nucleoside
  modified_base 5: mod_base = OTHER; note = 2'-fluoro-modified nucleoside
  modified_base 6: mod_base = OTHER; note = 2'-O-methyl modified nucleoside
  modified_base 7: mod_base = OTHER; note = 2'-O-methyl modified nucleoside
  modified_base 8: mod_base = OTHER; note = 2'-O-methyl modified nucleoside
  modified_base 9: mod_base = OTHER; note = 2'-fluoro-modified nucleoside
  modified_base 10: mod_base = OTHER; note = 2'-O-methyl modified nucleoside
  modified_base 11: mod_base = OTHER; note = 2'-fluoro-modified nucleoside
  modified_base 12: mod_base = OTHER; note = 2'-O-methyl modified nucleoside
  modified_base 13: mod_base = OTHER; note = 2'-O-methyl modified nucleoside
  modified_base 14: mod_base = OTHER; note = 2'-O-methyl modified nucleoside
  modified_base 15: mod_base = OTHER; note = 2'-O-methyl modified nucleoside
  modified_base 16: mod_base = OTHER; note = 2'-O-methyl modified nucleoside
  modified_base 17: mod_base = OTHER; note = 2'-O-methyl modified nucleoside
  modified_base 18: mod_base = OTHER; note = 2'-O-methyl modified nucleoside
  modified_base 19: mod_base = OTHER; note = 2'-O-methyl modified nucleoside with phosphorothioate linkage
  modified_base 20: mod_base = OTHER; note = 2'-O-methyl modified nucleoside with phosphorothioate linkage
  modified_base 21: mod_base = OTHER; note = 2'-O-methyl modified nucleoside
tccatgggcatatagttgatt

SEQ ID NO: 12935 - RNA, 21 nt, synthetic construct
  source 1..21: mol_type = other RNA
  misc_feature 1: note = ETL17 moiety with a phosphorothioate linkage
  modified_base 1: mod_base = OTHER; note = 2'-O-methyl modified nucleoside
  modified_base 2: mod_base = OTHER; note = 2'-O-methyl modified nucleoside
  modified_base 3: mod_base = OTHER; note = 2'-O-methyl modified nucleoside
  modified_base 4: mod_base = OTHER; note = 2'-O-methyl modified nucleoside
  modified_base 5: mod_base = OTHER; note = 2'-O-methyl modified nucleoside
  modified_base 6: mod_base = OTHER; note = 2'-fluoro-modified nucleoside
  modified_base 7: mod_base = OTHER; note = 2'-fluoro-modified nucleoside
  modified_base 8: mod_base = OTHER; note = 2'-fluoro-modified nucleoside
  modified_base 9: mod_base = OTHER; note = 2'-fluoro-modified nucleoside
  modified_base 10: mod_base = OTHER; note = 2'-O-methyl modified nucleoside
  modified_base 11: mod_base = OTHER; note = 2'-O-methyl modified nucleoside
  modified_base 12: mod_base = OTHER; note = 2'-O-methyl modified nucleoside
  modified_base 13: mod_base = OTHER; note = 2'-O-methyl modified nucleoside
  modified_base 14: mod_base = OTHER; note = 2'-O-methyl modified nucleoside
  modified_base 15: mod_base = OTHER; note = 2'-O-methyl modified nucleoside
  modified_base 16: mod_base = OTHER; note = 2'-O-methyl modified nucleoside
  modified_base 17: mod_base = OTHER; note = 2'-O-methyl modified nucleoside
  modified_base 18: mod_base = OTHER; note = 2'-O-methyl modified nucleoside
  modified_base 19: mod_base = OTHER; note = 2'-O-methyl modified nucleoside with phosphorothioate linkage
  modified_base 20: mod_base = OTHER; note = 2'-O-methyl modified nucleoside with phosphorothioate linkage
  modified_base 21: mod_base = OTHER; note = 2'-O-methyl modified nucleoside
atatattctgagttttgtatt

SEQ ID NO: 12936 - RNA, 21 nt, synthetic construct
  source 1..21: mol_type = other RNA
  misc_feature 1: note = ETL17 moiety with a phosphorothioate linkage
  modified_base 1: mod_base = OTHER; note = 2'-O-methyl modified nucleoside
  modified_base 2: mod_base = OTHER; note = 2'-O-methyl modified nucleoside
  modified_base 3: mod_base = OTHER; note = 2'-O-methyl modified nucleoside
  modified_base 4: mod_base = OTHER; note = 2'-O-methyl modified nucleoside
  modified_base 5: mod_base = OTHER; note = 2'-O-methyl modified nucleoside
  modified_base 6: mod_base = OTHER; note = 2'-fluoro-modified nucleoside
  modified_base 7: mod_base = OTHER; note = 2'-fluoro-modified nucleoside
  modified_base 8: mod_base = OTHER; note = 2'-fluoro-modified nucleoside
  modified_base 9: mod_base = OTHER; note = 2'-fluoro-modified nucleoside
  modified_base 10: mod_base = OTHER; note = 2'-O-methyl modified nucleoside
  modified_base 11: mod_base = OTHER; note = 2'-O-methyl modified nucleoside
  modified_base 12: mod_base = OTHER; note = 2'-O-methyl modified nucleoside
  modified_base 13: mod_base = OTHER; note = 2'-O-methyl modified nucleoside
  modified_base 14: mod_base = OTHER; note = 2'-O-methyl modified nucleoside
  modified_base 15: mod_base = OTHER; note = 2'-O-methyl modified nucleoside
  modified_base 16: mod_base = OTHER; note = 2'-O-methyl modified nucleoside
  modified_base 17: mod_base = OTHER; note = 2'-O-methyl modified nucleoside
  modified_base 18: mod_base = OTHER; note = 2'-O-methyl modified nucleoside
  modified_base 19: mod_base = OTHER; note = 2'-O-methyl modified nucleoside with phosphorothioate linkage
  modified_base 20: mod_base = OTHER; note = 2'-O-methyl modified nucleoside with phosphorothioate linkage
  modified_base 21: mod_base = OTHER; note = 2'-O-methyl modified nucleoside
atatattctgagttttgtatt

SEQ ID NO: 12937 - RNA, 21 nt, synthetic construct
  source 1..21: mol_type = other RNA
  misc_feature 1: note = ETL17 moiety with a phosphorothioate linkage
  modified_base 1: mod_base = OTHER; note = 2'-O-methyl modified nucleoside
  modified_base 2: mod_base = OTHER; note = 2'-O-methyl modified nucleoside
  modified_base 3: mod_base = OTHER; note = 2'-O-methyl modified nucleoside
  modified_base 4: mod_base = OTHER; note = 2'-O-methyl modified nucleoside
  modified_base 5: mod_base = OTHER; note = 2'-O-methyl modified nucleoside
  modified_base 6: mod_base = OTHER; note = 2'-fluoro-modified nucleoside
  modified_base 7: mod_base = OTHER; note = 2'-fluoro-modified nucleoside
  modified_base 8: mod_base = OTHER; note = 2'-fluoro-modified nucleoside
  modified_base 9: mod_base = OTHER; note = 2'-fluoro-modified nucleoside
  modified_base 10: mod_base = OTHER; note = 2'-O-methyl modified nucleoside
  modified_base 11: mod_base = OTHER; note = 2'-O-methyl modified nucleoside
  modified_base 12: mod_base = OTHER; note = 2'-O-methyl modified nucleoside
  modified_base 13: mod_base = OTHER; note = 2'-O-methyl modified nucleoside
  modified_base 14: mod_base = OTHER; note = 2'-O-methyl modified nucleoside
  modified_base 15: mod_base = OTHER; note = 2'-O-methyl modified nucleoside
  modified_base 16: mod_base = OTHER; note = 2'-O-methyl modified nucleoside
  modified_base 17: mod_base = OTHER; note = 2'-O-methyl modified nucleoside
  modified_base 18: mod_base = OTHER; note = 2'-O-methyl modified nucleoside
  modified_base 19: mod_base = OTHER; note = 2'-O-methyl modified nucleoside with phosphorothioate linkage
  modified_base 20: mod_base = OTHER; note = 2'-O-methyl modified nucleoside with phosphorothioate linkage
  modified_base 21: mod_base = OTHER; note = 2'-O-methyl modified nucleoside
atatattctgagttttgtatt

SEQ ID NO: 12938 - RNA, 21 nt, synthetic construct
  source 1..21: mol_type = other RNA
  misc_feature 1: note = ETL17 moiety with a phosphorothioate linkage
  modified_base 1: mod_base = OTHER; note = 2'-O-methyl modified nucleoside
  modified_base 2: mod_base = OTHER; note = 2'-O-methyl modified nucleoside
  modified_base 3: mod_base = OTHER; note = 2'-O-methyl modified nucleoside
  modified_base 4: mod_base = OTHER; note = 2'-O-methyl modified nucleoside
  modified_base 5: mod_base = OTHER; note = 2'-O-methyl modified nucleoside
  modified_base 6: mod_base = OTHER; note = 2'-fluoro-modified nucleoside
  modified_base 7: mod_base = OTHER; note = 2'-fluoro-modified nucleoside
  modified_base 8: mod_base = OTHER; note = 2'-fluoro-modified nucleoside
  modified_base 9: mod_base = OTHER; note = 2'-fluoro-modified nucleoside
  modified_base 10: mod_base = OTHER; note = 2'-O-methyl modified nucleoside
  modified_base 11: mod_base = OTHER; note = 2'-O-methyl modified nucleoside
  modified_base 12: mod_base = OTHER; note = 2'-O-methyl modified nucleoside
  modified_base 13: mod_base = OTHER; note = 2'-O-methyl modified nucleoside
  modified_base 14: mod_base = OTHER; note = 2'-O-methyl modified nucleoside
  modified_base 15: mod_base = OTHER; note = 2'-O-methyl modified nucleoside
  modified_base 16: mod_base = OTHER; note = 2'-O-methyl modified nucleoside
  modified_base 17: mod_base = OTHER; note = 2'-O-methyl modified nucleoside
  modified_base 18: mod_base = OTHER; note = 2'-O-methyl modified nucleoside
  modified_base 19: mod_base = OTHER; note = 2'-O-methyl modified nucleoside with phosphorothioate linkage
  modified_base 20: mod_base = OTHER; note = 2'-O-methyl modified nucleoside with phosphorothioate linkage
  modified_base 21: mod_base = OTHER; note = 2'-O-methyl modified nucleoside
atatattctgagttttgtatt

SEQ ID NO: 12939 - RNA, 21 nt, synthetic construct
  source 1..21: mol_type = other RNA
  misc_feature 1: note = ETL17 moiety with a phosphorothioate linkage
  modified_base 1: mod_base = OTHER; note = 2'-O-methyl modified nucleoside
  modified_base 2: mod_base = OTHER; note = 2'-O-methyl modified nucleoside
  modified_base 3: mod_base = OTHER; note = 2'-O-methyl modified nucleoside
  modified_base 4: mod_base = OTHER; note = 2'-O-methyl modified nucleoside
  modified_base 5: mod_base = OTHER; note = 2'-O-methyl modified nucleoside
  modified_base 6: mod_base = OTHER; note = 2'-fluoro-modified nucleoside
  modified_base 7: mod_base = OTHER; note = 2'-fluoro-modified nucleoside
  modified_base 8: mod_base = OTHER; note = 2'-fluoro-modified nucleoside
  modified_base 9: mod_base = OTHER; note = 2'-fluoro-modified nucleoside
  modified_base 10: mod_base = OTHER; note = 2'-O-methyl modified nucleoside
  modified_base 11: mod_base = OTHER; note = 2'-O-methyl modified nucleoside
  modified_base 12: mod_base = OTHER; note = 2'-O-methyl modified nucleoside
  modified_base 13: mod_base = OTHER; note = 2'-O-methyl modified nucleoside
  modified_base 14: mod_base = OTHER; note = 2'-O-methyl modified nucleoside
  modified_base 15: mod_base = OTHER; note = 2'-O-methyl modified nucleoside
  modified_base 16: mod_base = OTHER; note = 2'-O-methyl modified nucleoside
  modified_base 17: mod_base = OTHER; note = 2'-O-methyl modified nucleoside
  modified_base 18: mod_base = OTHER; note = 2'-O-methyl modified nucleoside
  modified_base 19: mod_base = OTHER; note = 2'-O-methyl modified nucleoside with phosphorothioate linkage
  modified_base 20: mod_base = OTHER; note = 2'-O-methyl modified nucleoside with phosphorothioate linkage
  modified_base 21: mod_base = OTHER; note = 2'-O-methyl modified nucleoside
atatattctgagttttgtatt

SEQ ID NO: 12940 - RNA, 21 nt, synthetic construct
  source 1..21: mol_type = other RNA
  misc_feature 1: note = ETL17 moiety with a phosphorothioate linkage
  modified_base 1: mod_base = OTHER; note = 2'-O-methyl modified nucleoside
  modified_base 2: mod_base = OTHER; note = 2'-O-methyl modified nucleoside
  modified_base 3: mod_base = OTHER; note = 2'-O-methyl modified nucleoside
  modified_base 4: mod_base = OTHER; note = 2'-O-methyl modified nucleoside
  modified_base 5: mod_base = OTHER; note = 2'-O-methyl modified nucleoside
  modified_base 6: mod_base = OTHER; note = 2'-fluoro-modified nucleoside
  modified_base 7: mod_base = OTHER; note = 2'-fluoro-modified nucleoside
  modified_base 8: mod_base = OTHER; note = 2'-fluoro-modified nucleoside
  modified_base 9: mod_base = OTHER; note = 2'-fluoro-modified nucleoside
  modified_base 10: mod_base = OTHER; note = 2'-O-methyl modified nucleoside
  modified_base 11: mod_base = OTHER; note = 2'-O-methyl modified nucleoside
  modified_base 12: mod_base = OTHER; note = 2'-O-methyl modified nucleoside
  modified_base 13: mod_base = OTHER; note = 2'-O-methyl modified nucleoside
  modified_base 14: mod_base = OTHER; note = 2'-O-methyl modified nucleoside
  modified_base 15: mod_base = OTHER; note = 2'-O-methyl modified nucleoside
  modified_base 16: mod_base = OTHER; note = 2'-O-methyl modified nucleoside
  modified_base 17: mod_base = OTHER; note = 2'-O-methyl modified nucleoside
  modified_base 18: mod_base = OTHER; note = 2'-O-methyl modified nucleoside
  modified_base 19: mod_base = OTHER; note = 2'-O-methyl modified nucleoside with phosphorothioate linkage
  modified_base 20: mod_base = OTHER; note = 2'-O-methyl modified nucleoside with phosphorothioate linkage
  modified_base 21: mod_base = OTHER; note = 2'-O-methyl modified nucleoside
atatattctgagttttgtatt

SEQ ID NO: 12941 - RNA, 21 nt, synthetic construct
  source 1..21: mol_type = other RNA
  misc_feature 1: note = ETL17 moiety with a phosphorothioate linkage
  modified_base 1: mod_base = OTHER; note = 2'-O-methyl modified nucleoside
  modified_base 2: mod_base = OTHER; note = 2'-O-methyl modified nucleoside
  modified_base 3: mod_base = OTHER; note = 2'-O-methyl modified nucleoside
  modified_base 4: mod_base = OTHER; note = 2'-O-methyl modified nucleoside
  modified_base 5: mod_base = OTHER; note = 2'-O-methyl modified nucleoside
  modified_base 6: mod_base = OTHER; note = 2'-fluoro-modified nucleoside
  modified_base 7: mod_base = OTHER; note = 2'-fluoro-modified nucleoside
  modified_base 8: mod_base = OTHER; note = 2'-fluoro-modified nucleoside
  modified_base 9: mod_base = OTHER; note = 2'-fluoro-modified nucleoside
  modified_base 10: mod_base = OTHER; note = 2'-O-methyl modified nucleoside
  modified_base 11: mod_base = OTHER; note = 2'-O-methyl modified nucleoside
  modified_base 12: mod_base = OTHER; note = 2'-O-methyl modified nucleoside
  modified_base 13: mod_base = OTHER; note = 2'-O-methyl modified nucleoside
  modified_base 14: mod_base = OTHER; note = 2'-O-methyl modified nucleoside
  modified_base 15: mod_base = OTHER; note = 2'-O-methyl modified nucleoside
  modified_base 16: mod_base = OTHER; note = 2'-O-methyl modified nucleoside
  modified_base 17: mod_base = OTHER; note = 2'-O-methyl modified nucleoside
  modified_base 18: mod_base = OTHER; note = 2'-O-methyl modified nucleoside
  modified_base 19: mod_base = OTHER; note = 2'-O-methyl modified nucleoside with phosphorothioate linkage
  modified_base 20: mod_base = OTHER; note = 2'-O-methyl modified nucleoside with phosphorothioate linkage
  modified_base 21: mod_base = OTHER; note = 2'-O-methyl modified nucleoside
atatattctgagttttgtatt

SEQ ID NO: 12942 - RNA, 21 nt, synthetic construct
  source 1..21: mol_type = other RNA
  misc_feature 1: note = ETL17 moiety with a phosphorothioate linkage
  modified_base 1: mod_base = OTHER; note = 2'-O-methyl modified nucleoside
  modified_base 2: mod_base = OTHER; note = 2'-O-methyl modified nucleoside
  modified_base 3: mod_base = OTHER; note = 2'-O-methyl modified nucleoside
  modified_base 4: mod_base = OTHER; note = 2'-O-methyl modified nucleoside
  modified_base 5: mod_base = OTHER; note = 2'-O-methyl modified nucleoside
  modified_base 6: mod_base = OTHER; note = 2'-fluoro-modified nucleoside
  modified_base 7: mod_base = OTHER; note = 2'-fluoro-modified nucleoside
  modified_base 8: mod_base = OTHER; note = 2'-fluoro-modified nucleoside
  modified_base 9: mod_base = OTHER; note = 2'-fluoro-modified nucleoside
  modified_base 10: mod_base = OTHER; note = 2'-O-methyl modified nucleoside
  modified_base 11: mod_base = OTHER; note = 2'-O-methyl modified nucleoside
  modified_base 12: mod_base = OTHER; note = 2'-O-methyl modified nucleoside
  modified_base 13: mod_base = OTHER; note = 2'-O-methyl modified nucleoside
  modified_base 14: mod_base = OTHER; note = 2'-O-methyl modified nucleoside
  modified_base 15: mod_base = OTHER; note = 2'-O-methyl modified nucleoside
  modified_base 16: mod_base = OTHER; note = 2'-O-methyl modified nucleoside
  modified_base 17: mod_base = OTHER; note = 2'-O-methyl modified nucleoside
  modified_base 18: mod_base = OTHER; note = 2'-O-methyl modified nucleoside
  modified_base 19: mod_base = OTHER; note = 2'-O-methyl modified nucleoside with phosphorothioate linkage
  modified_base 20: mod_base = OTHER; note = 2'-O-methyl modified nucleoside with phosphorothioate linkage
  modified_base 21: mod_base = OTHER; note = 2'-O-methyl modified nucleoside
atatattctgagttttgtatt

SEQ ID NO: 12943 - RNA, 21 nt, synthetic construct
  source 1..21: mol_type = other RNA
  misc_feature 1: note = ETL17 moiety with a phosphorothioate linkage
  modified_base 1: mod_base = OTHER; note = 2'-O-methyl modified nucleoside
  modified_base 2: mod_base = OTHER; note = 2'-O-methyl modified nucleoside
  modified_base 3: mod_base = OTHER; note = 2'-O-methyl modified nucleoside
  modified_base 4: mod_base = OTHER; note = 2'-methoxy ethyl nucleoside
  modified_base 5: mod_base = OTHER; note = 2'-O-methyl modified nucleoside
  modified_base 6: mod_base = OTHER; note = 2'-fluoro-modified nucleoside
  modified_base 7: mod_base = OTHER; note = 2'-fluoro-modified nucleoside
  modified_base 8: mod_base = OTHER; note = 2'-fluoro-modified nucleoside
  modified_base 9: mod_base = OTHER; note = 2'-fluoro-modified nucleoside
  modified_base 10: mod_base = OTHER; note = 2'-O-methyl modified nucleoside
  modified_base 11: mod_base = OTHER; note = 2'-O-methyl modified nucleoside
  modified_base 12: mod_base = OTHER; note = 2'-O-methyl modified nucleoside
  modified_base 13: mod_base = OTHER; note = 2'-methoxy ethyl nucleoside
  modified_base 14: mod_base = OTHER; note = 2'-O-methyl modified nucleoside
  modified_base 15: mod_base = OTHER; note = 2'-O-methyl modified nucleoside
  modified_base 16: mod_base = OTHER; note = 2'-O-methyl modified nucleoside
  modified_base 17: mod_base = OTHER; note = 2'-O-methyl modified nucleoside
  modified_base 18: mod_base = OTHER; note = 2'-O-methyl modified nucleoside
  modified_base 19: mod_base = OTHER; note = 2'-O-methyl modified nucleoside with phosphorothioate linkage
  modified_base 20: mod_base = OTHER; note = 2'-O-methyl modified nucleoside with phosphorothioate linkage
  modified_base 21: mod_base = OTHER; note = 2'-O-methyl modified nucleoside
attcactgctagcaagtcatt

SEQ ID NO: 12944 - RNA, 21 nt, synthetic construct
  source 1..21: mol_type = other RNA
  misc_feature 1: note = ETL17 moiety with a phosphorothioate linkage
  modified_base 1: mod_base = OTHER; note = 2'-O-methyl modified nucleoside
  modified_base 2: mod_base = OTHER; note = 2'-O-methyl modified nucleoside
  modified_base 3: mod_base = OTHER; note = 2'-O-methyl modified nucleoside
  modified_base 4: mod_base = OTHER; note = 2'-methoxy ethyl nucleoside
  modified_base 5: mod_base = OTHER; note = 2'-O-methyl modified nucleoside
  modified_base 6: mod_base = OTHER; note = 2'-fluoro-modified nucleoside
  modified_base 7: mod_base = OTHER; note = 2'-fluoro-modified nucleoside
  modified_base 8: mod_base = OTHER; note = 2'-fluoro-modified nucleoside
  modified_base 9: mod_base = OTHER; note = 2'-fluoro-modified nucleoside
  modified_base 10: mod_base = OTHER; note = 2'-O-methyl modified nucleoside
  modified_base 11: mod_base = OTHER; note = 2'-O-methyl modified nucleoside
  modified_base 12: mod_base = OTHER; note = 2'-methoxy ethyl nucleoside
  modified_base 13: mod_base = OTHER; note = 2'-O-methyl modified nucleoside
  modified_base 14: mod_base = OTHER; note = 2'-O-methyl modified nucleoside
  modified_base 15: mod_base = OTHER; note = 2'-O-methyl modified nucleoside
  modified_base 16: mod_base = OTHER; note = 2'-O-methyl modified nucleoside
  modified_base 17: mod_base = OTHER; note = 2'-O-methyl modified nucleoside
  modified_base 18: mod_base = OTHER; note = 2'-O-methyl modified nucleoside
  modified_base 19: mod_base = OTHER; note = 2'-O-methyl modified nucleoside with phosphorothioate linkage
  modified_base 20: mod_base = OTHER; note = 2'-O-methyl modified nucleoside with phosphorothioate linkage
  modified_base 21: mod_base = OTHER; note = 2'-O-methyl modified nucleoside
attcactgctagcaagtcatt

SEQ ID NO: 12945 - RNA, 21 nt, synthetic construct
  source 1..21: mol_type = other RNA
  misc_feature 1: note = ETL17 moiety with a phosphorothioate linkage
  modified_base 1: mod_base = OTHER; note = 2'-O-methyl modified nucleoside
  modified_base 2: mod_base = OTHER; note = 2'-O-methyl modified nucleoside
  modified_base 3: mod_base = OTHER; note = 2'-O-methyl modified nucleoside
  modified_base 4: mod_base = OTHER; note = 2'-methoxy ethyl nucleoside
  modified_base 5: mod_base = OTHER; note = 2'-O-methyl modified nucleoside
  modified_base 6: mod_base = OTHER; note = 2'-fluoro-modified nucleoside
  modified_base 7: mod_base = OTHER; note = 2'-fluoro-modified nucleoside
  modified_base 8: mod_base = OTHER; note = 2'-fluoro-modified nucleoside
  modified_base 9: mod_base = OTHER; note = 2'-fluoro-modified nucleoside
  modified_base 10: mod_base = OTHER; note = 2'-O-methyl modified nucleoside
  modified_base 11: mod_base = OTHER; note = 2'-O-methyl modified nucleoside
  modified_base 12: mod_base = OTHER; note = 2'-methoxy ethyl nucleoside
  modified_base 13: mod_base = OTHER; note = 2'-O-methyl modified nucleoside
  modified_base 14: mod_base = OTHER; note = 2'-O-methyl modified nucleoside
  modified_base 15: mod_base = OTHER; note = 2'-O-methyl modified nucleoside
  modified_base 16: mod_base = OTHER; note = 2'-O-methyl modified nucleoside
  modified_base 17: mod_base = OTHER; note = 2'-O-methyl modified nucleoside
  modified_base 18: mod_base = OTHER; note = 2'-O-methyl modified nucleoside
  modified_base 19: mod_base = OTHER; note = 2'-O-methyl modified nucleoside with phosphorothioate linkage
  modified_base 20: mod_base = OTHER; note = 2'-O-methyl modified nucleoside with phosphorothioate linkage
  modified_base 21: mod_base = OTHER; note = 2'-O-methyl modified nucleoside
attcactgctagcaagtcatt

SEQ ID NO: 12946 - RNA, 21 nt, synthetic construct
  source 1..21: mol_type = other RNA
  misc_feature 1: note = ETL17 moiety with a phosphorothioate linkage
  modified_base 1: mod_base = OTHER; note = 2'-O-methyl modified nucleoside
  modified_base 2: mod_base = OTHER; note = 2'-O-methyl modified nucleoside
  modified_base 3: mod_base = OTHER; note = 2'-O-methyl modified nucleoside
  modified_base 4: mod_base = OTHER; note = 2'-methoxy ethyl nucleoside
  modified_base 5: mod_base = OTHER; note = 2'-O-methyl modified nucleoside
  modified_base 6: mod_base = OTHER; note = 2'-fluoro-modified nucleoside
  modified_base 7: mod_base = OTHER; note = 2'-fluoro-modified nucleoside
  modified_base 8: mod_base = OTHER; note = 2'-fluoro-modified nucleoside
  modified_base 9: mod_base = OTHER; note = 2'-fluoro-modified nucleoside
  modified_base 10: mod_base = OTHER; note = 2'-O-methyl modified nucleoside
  modified_base 11: mod_base = OTHER; note = 2'-O-methyl modified nucleoside
  modified_base 12: mod_base = OTHER; note = 2'-O-methyl modified nucleoside
  modified_base 13: mod_base = OTHER; note = 2'-methoxy ethyl nucleoside
  modified_base 14: mod_base = OTHER; note = 2'-O-methyl modified nucleoside
  modified_base 15: mod_base = OTHER; note = 2'-O-methyl modified nucleoside
  modified_base 16: mod_base = OTHER; note = 2'-O-methyl modified nucleoside
  modified_base 17: mod_base = OTHER; note = 2'-O-methyl modified nucleoside
  modified_base 18: mod_base = OTHER; note = 2'-O-methyl modified nucleoside
  modified_base 19: mod_base = OTHER; note = 2'-O-methyl modified nucleoside with phosphorothioate linkage
  modified_base 20: mod_base = OTHER; note = 2'-O-methyl modified nucleoside with phosphorothioate linkage
  modified_base 21: mod_base = OTHER; note = 2'-O-methyl modified nucleoside
attcactgctagcaagtcatt

SEQ ID NO: 12947 - RNA, 21 nt, synthetic construct
  source 1..21: mol_type = other RNA
  misc_feature 1: note = ETL17 moiety with a phosphorothioate linkage
  modified_base 1: mod_base = OTHER; note = 2'-O-methyl modified nucleoside
  modified_base 2: mod_base = OTHER; note = 2'-O-methyl modified nucleoside
  modified_base 3: mod_base = OTHER; note = 2'-O-methyl modified nucleoside
  modified_base 4: mod_base = OTHER; note = 2'-methoxy ethyl nucleoside
  modified_base 5: mod_base = OTHER; note = 2'-O-methyl modified nucleoside
  modified_base 6: mod_base = OTHER; note = 2'-fluoro-modified nucleoside
  modified_base 7: mod_base = OTHER; note = 2'-fluoro-modified nucleoside
  modified_base 8: mod_base = OTHER; note = 2'-fluoro-modified nucleoside
  modified_base 9: mod_base = OTHER; note = 2'-fluoro-modified nucleoside
  modified_base 10: mod_base = OTHER; note = 2'-O-methyl modified nucleoside
  modified_base 11: mod_base = OTHER; note = 2'-O-methyl modified nucleoside
  modified_base 12: mod_base = OTHER; note = 2'-methoxy ethyl nucleoside
  modified_base 13: mod_base = OTHER; note = 2'-O-methyl modified nucleoside
  modified_base 14: mod_base = OTHER; note = 2'-O-methyl modified nucleoside
  modified_base 15: mod_base = OTHER; note = 2'-O-methyl modified nucleoside
  modified_base 16: mod_base = OTHER; note = 2'-O-methyl modified nucleoside
  modified_base 17: mod_base = OTHER; note = 2'-O-methyl modified nucleoside
  modified_base 18: mod_base = OTHER; note = 2'-O-methyl modified nucleoside
  modified_base 19: mod_base = OTHER; note = 2'-O-methyl modified nucleoside with phosphorothioate linkage
  modified_base 20: mod_base = OTHER; note = 2'-O-methyl modified nucleoside with phosphorothioate linkage
  modified_base 21: mod_base = OTHER; note = 2'-O-methyl modified nucleoside
tggaatctcctatgatcgatt

SEQ ID NO: 12948 - RNA, 21 nt, synthetic construct
  source 1..21: mol_type = other RNA
  misc_feature 1: note = ETL17 moiety with a phosphorothioate linkage
  modified_base 1: mod_base = OTHER; note = 2'-O-methyl modified nucleoside
  modified_base 2: mod_base = OTHER; note = 2'-O-methyl modified nucleoside
  modified_base 3: mod_base = OTHER; note = 2'-O-methyl modified nucleoside
  modified_base 4: mod_base = OTHER; note = 2'-methoxy ethyl nucleoside
  modified_base 5: mod_base = OTHER; note = 2'-O-methyl modified nucleoside
  modified_base 6: mod_base = OTHER; note = 2'-fluoro-modified nucleoside
  modified_base 7: mod_base = OTHER; note = 2'-fluoro-modified nucleoside
  modified_base 8: mod_base = OTHER; note = 2'-fluoro-modified nucleoside
  modified_base 9: mod_base = OTHER; note = 2'-fluoro-modified nucleoside
  modified_base 10: mod_base = OTHER; note = 2'-O-methyl modified nucleoside
  modified_base 11: mod_base = OTHER; note = 2'-O-methyl modified nucleoside
  modified_base 12: mod_base = OTHER; note = 2'-O-methyl modified nucleoside
  modified_base 13: mod_base = OTHER; note = 2'-methoxy ethyl thymidine
  modified_base 14: mod_base = OTHER; note = 2'-O-methyl modified nucleoside
  modified_base 15: mod_base = OTHER; note = 2'-O-methyl modified nucleoside
  modified_base 16: mod_base = OTHER; note = 2'-O-methyl modified nucleoside
  modified_base 17: mod_base = OTHER; note = 2'-O-methyl modified nucleoside
  modified_base 18: mod_base = OTHER; note = 2'-O-methyl modified nucleoside
  modified_base 19: mod_base = OTHER; note = 2'-O-methyl modified nucleoside with phosphorothioate linkage
  modified_base 20: mod_base = OTHER; note = 2'-O-methyl modified nucleoside with phosphorothioate linkage
  modified_base 21: mod_base = OTHER; note = 2'-O-methyl modified nucleoside
tggaatctcctatgatcgatt

SEQ ID NO: 12949 - RNA, 21 nt, synthetic construct
  source 1..21: mol_type = other RNA
  misc_feature 1: note = ETL17 moiety with a phosphorothioate linkage
  modified_base 1: mod_base = OTHER; note = 2'-O-methyl modified nucleoside
  modified_base 2: mod_base = OTHER; note = 2'-O-methyl modified nucleoside
  modified_base 3: mod_base = OTHER; note = 2'-O-methyl modified nucleoside
  modified_base 4: mod_base = OTHER; note = 2'-methoxy ethyl nucleoside
  modified_base 5: mod_base = OTHER; note = 2'-O-methyl modified nucleoside
  modified_base 6: mod_base = OTHER; note = 2'-fluoro-modified nucleoside
  modified_base 7: mod_base = OTHER; note = 2'-fluoro-modified nucleoside
  modified_base 8: mod_base = OTHER; note = 2'-fluoro-modified nucleoside
  modified_base 9: mod_base = OTHER; note = 2'-fluoro-modified nucleoside
  modified_base 10: mod_base = OTHER; note = 2'-O-methyl modified nucleoside
  modified_base 11: mod_base = OTHER; note = 2'-O-methyl modified nucleoside
  modified_base 12: mod_base = OTHER; note = 2'-O-methyl modified nucleoside
  modified_base 13: mod_base = OTHER; note = 2'-methoxy ethyl nucleoside
  modified_base 14: mod_base = OTHER; note = 2'-O-methyl modified nucleoside
  modified_base 15: mod_base = OTHER; note = 2'-O-methyl modified nucleoside
  modified_base 16: mod_base = OTHER; note = 2'-O-methyl modified nucleoside
  modified_base 17: mod_base = OTHER; note = 2'-O-methyl modified nucleoside
  modified_base 18: mod_base = OTHER; note = 2'-O-methyl modified nucleoside
  modified_base 19: mod_base = OTHER; note = 2'-O-methyl modified nucleoside with phosphorothioate linkage
  modified_base 20: mod_base = OTHER; note = 2'-O-methyl modified nucleoside with phosphorothioate linkage
  modified_base 21: mod_base = OTHER; note = 2'-O-methyl modified nucleoside
aaactgatagctgagtccatt

SEQ ID NO: 12950 - RNA, 21 nt, synthetic construct
  source 1..21: mol_type = other RNA
  misc_feature 1: note = ETL17 moiety with a phosphorothioate linkage
  modified_base 1: mod_base = OTHER; note = 2'-O-methyl modified nucleoside
  modified_base 2: mod_base = OTHER; note = 2'-O-methyl modified nucleoside
  modified_base 3: mod_base = OTHER; note = 2'-O-methyl modified nucleoside
  modified_base 4: mod_base = OTHER; note = 2'-methoxy ethyl thymidine
  modified_base 5: mod_base = OTHER; note = 2'-O-methyl modified nucleoside
  modified_base 6: mod_base = OTHER; note = 2'-fluoro-modified nucleoside
  modified_base 7: mod_base = OTHER; note = 2'-fluoro-modified nucleoside
  modified_base 8: mod_base = OTHER; note = 2'-fluoro-modified nucleoside
  modified_base 9: mod_base = OTHER; note = 2'-fluoro-modified nucleoside
  modified_base 10: mod_base = OTHER; note = 2'-O-methyl modified nucleoside
  modified_base 11: mod_base = OTHER; note = 2'-O-methyl modified nucleoside
  modified_base 12: mod_base = OTHER; note = 2'-O-methyl modified nucleoside
  modified_base 13: mod_base = OTHER; note = 2'-methoxy ethyl thymidine
  modified_base 14: mod_base = OTHER; note = 2'-O-methyl modified nucleoside
  modified_base 15: mod_base = OTHER; note = 2'-O-methyl modified nucleoside
  modified_base 16: mod_base = OTHER; note = 2'-O-methyl modified nucleoside
  modified_base 17: mod_base = OTHER; note = 2'-O-methyl modified nucleoside
  modified_base 18: mod_base = OTHER; note = 2'-O-methyl modified nucleoside
  modified_base 19: mod_base = OTHER; note = 2'-O-methyl modified nucleoside with phosphorothioate linkage
  modified_base 20: mod_base = OTHER; note = 2'-O-methyl modified nucleoside with phosphorothioate linkage
  modified_base 21: mod_base = OTHER; note = 2'-O-methyl modified nucleoside
ttgtgacatggatgaatcatt

SEQ ID NO: 12951 - RNA, 21 nt, synthetic construct
  source 1..21: mol_type = other RNA
  misc_feature 1: note = ETL17 moiety with a phosphorothioate linkage
  modified_base 1: mod_base = OTHER; note = 2'-O-methyl modified nucleoside
  modified_base 2: mod_base = OTHER; note = 2'-O-methyl modified nucleoside
  modified_base 3: mod_base = OTHER; note = 2'-O-methyl modified nucleoside
  modified_base 4: mod_base = OTHER; note = 2'-methoxy ethyl nucleoside
  modified_base 5: mod_base = OTHER; note = 2'-O-methyl modified nucleoside
  modified_base 6: mod_base = OTHER; note = 2'-fluoro-modified nucleoside
  modified_base 7: mod_base = OTHER; note = 2'-fluoro-modified nucleoside
  modified_base 8: mod_base = OTHER; note = 2'-fluoro-modified nucleoside
  modified_base 9: mod_base = OTHER; note = 2'-fluoro-modified nucleoside
  modified_base 10: mod_base = OTHER; note = 2'-O-methyl modified nucleoside
  modified_base 11: mod_base = OTHER; note = 2'-O-methyl modified nucleoside
  modified_base 12: mod_base = OTHER; note = 2'-O-methyl modified nucleoside
  modified_base 13: mod_base = OTHER; note = 2'-methoxy ethyl thymidine
  modified_base 14: mod_base = OTHER; note = 2'-O-methyl modified nucleoside
  modified_base 15: mod_base = OTHER; note = 2'-O-methyl modified nucleoside
  modified_base 16: mod_base = OTHER; note = 2'-O-methyl modified nucleoside
  modified_base 17: mod_base = OTHER; note = 2'-O-methyl modified nucleoside
  modified_base 18: mod_base = OTHER; note = 2'-O-methyl modified nucleoside
  modified_base 19: mod_base = OTHER; note = 2'-O-methyl modified nucleoside with phosphorothioate linkage
  modified_base 20: mod_base = OTHER; note = 2'-O-methyl modified nucleoside with phosphorothioate linkage
  modified_base 21: mod_base = OTHER; note = 2'-O-methyl modified nucleoside
agaatacagtgttggtcgatt

SEQ ID NO: 12952 - RNA, 21 nt, synthetic construct
  source 1..21: mol_type = other RNA
  misc_feature 1: note = ETL17 moiety with a phosphorothioate linkage
  modified_base 1: mod_base = OTHER; note = 2'-O-methyl modified nucleoside
  modified_base 2: mod_base = OTHER; note = 2'-O-methyl modified nucleoside
  modified_base 3: mod_base = OTHER; note = 2'-O-methyl modified nucleoside
  modified_base 4: mod_base = OTHER; note = 2'-methoxy ethyl nucleoside
  modified_base 5: mod_base = OTHER; note = 2'-O-methyl modified nucleoside
  modified_base 6: mod_base = OTHER; note = 2'-fluoro-modified nucleoside
  modified_base 7: mod_base = OTHER; note = 2'-fluoro-modified nucleoside
  modified_base 8: mod_base = OTHER; note = 2'-fluoro-modified nucleoside
  modified_base 9: mod_base = OTHER; note = 2'-fluoro-modified nucleoside
  modified_base 10: mod_base = OTHER; note = 2'-O-methyl modified nucleoside
  modified_base 11: mod_base = OTHER; note = 2'-O-methyl modified nucleoside
  modified_base 12: mod_base = OTHER; note = 2'-O-methyl modified nucleoside
  modified_base 13: mod_base = OTHER; note = 2'-methoxy ethyl nucleoside
  modified_base 14: mod_base = OTHER; note = 2'-O-methyl modified nucleoside
  modified_base 15: mod_base = OTHER; note = 2'-O-methyl modified nucleoside
  modified_base 16: mod_base = OTHER; note = 2'-O-methyl modified nucleoside
  modified_base 17: mod_base = OTHER; note = 2'-O-methyl modified nucleoside
  modified_base 18: mod_base = OTHER; note = 2'-O-methyl modified nucleoside
  modified_base 19: mod_base = OTHER; note = 2'-O-methyl modified nucleoside with phosphorothioate linkage
  modified_base 20: mod_base = OTHER; note = 2'-O-methyl modified nucleoside with phosphorothioate linkage
  modified_base 21: mod_base = OTHER; note = 2'-O-methyl modified nucleoside
aatacagtgttggtcgatatt

SEQ ID NO: 12953 - RNA, 21 nt, synthetic construct
  source 1..21: mol_type = other RNA
  misc_feature 1: note = ETL17 moiety with a phosphorothioate linkage
  modified_base 1: mod_base = OTHER; note = 2'-O-methyl modified nucleoside
  modified_base 2: mod_base = OTHER; note = 2'-O-methyl modified nucleoside
  modified_base 3: mod_base = OTHER; note = 2'-O-methyl modified nucleoside
  modified_base 4: mod_base = OTHER; note = 2'-methoxy ethyl nucleoside
  modified_base 5: mod_base = OTHER; note = 2'-O-methyl modified nucleoside
  modified_base 6: mod_base = OTHER; note = 2'-fluoro-modified nucleoside
  modified_base 7: mod_base = OTHER; note = 2'-fluoro-modified nucleoside
  modified_base 8: mod_base = OTHER; note = 2'-fluoro-modified nucleoside
  modified_base 9: mod_base = OTHER; note = 2'-fluoro-modified nucleoside
  modified_base 10: mod_base = OTHER; note = 2'-O-methyl modified nucleoside
  modified_base 11: mod_base = OTHER; note = 2'-O-methyl modified nucleoside
  modified_base 12: mod_base = OTHER; note = 2'-O-methyl modified nucleoside
  modified_base 13: mod_base = OTHER; note = 2'-methoxy ethyl thymidine
  modified_base 14: mod_base = OTHER; note = 2'-O-methyl modified nucleoside
  modified_base 15: mod_base = OTHER; note = 2'-O-methyl modified nucleoside
  modified_base 16: mod_base = OTHER; note = 2'-O-methyl modified nucleoside
  modified_base 17: mod_base = OTHER; note = 2'-O-methyl modified nucleoside
  modified_base 18: mod_base = OTHER; note = 2'-O-methyl modified nucleoside
  modified_base 19: mod_base = OTHER; note = 2'-O-methyl modified nucleoside with phosphorothioate linkage
  modified_base 20: mod_base = OTHER; note = 2'-O-methyl modified nucleoside with phosphorothioate linkage
  modified_base 21: mod_base = OTHER; note = 2'-O-methyl modified nucleoside
atacagtgttggtcgatgatt

SEQ ID NO: 12954 - RNA, 21 nt, synthetic construct
  source 1..21: mol_type = other RNA
  misc_feature 1: note = ETL17 moiety with a phosphorothioate linkage
  modified_base 1: mod_base = OTHER; note = 2'-O-methyl modified nucleoside
  modified_base 2: mod_base = OTHER; note = 2'-O-methyl modified nucleoside
  modified_base 3: mod_base = OTHER; note = 2'-O-methyl modified nucleoside
  modified_base 4: mod_base = OTHER; note = 2'-methoxy ethyl nucleoside
  modified_base 5: mod_base = OTHER; note = 2'-O-methyl modified nucleoside
  modified_base 6: mod_base = OTHER; note = 2'-fluoro-modified nucleoside
  modified_base 7: mod_base = OTHER; note = 2'-fluoro-modified nucleoside
  modified_base 8: mod_base = OTHER; note = 2'-fluoro-modified nucleoside
  modified_base 9: mod_base = OTHER; note = 2'-fluoro-modified nucleoside
  modified_base 10: mod_base = OTHER; note = 2'-O-methyl modified nucleoside
  modified_base 11: mod_base = OTHER; note = 2'-O-methyl modified nucleoside
  modified_base 12: mod_base = OTHER; note = 2'-O-methyl modified nucleoside
  modified_base 13: mod_base = OTHER; note = 2'-methoxy ethyl nucleoside
  modified_base 14: mod_base = OTHER; note = 2'-O-methyl modified nucleoside
  modified_base 15: mod_base = OTHER; note = 2'-O-methyl modified nucleoside
  modified_base 16: mod_base = OTHER; note = 2'-O-methyl modified nucleoside
  modified_base 17: mod_base = OTHER; note = 2'-O-methyl modified nucleoside
  modified_base 18: mod_base = OTHER; note = 2'-O-methyl modified nucleoside
  modified_base 19: mod_base = OTHER; note = 2'-O-methyl modified nucleoside with phosphorothioate linkage
  modified_base 20: mod_base = OTHER; note = 2'-O-methyl modified nucleoside with phosphorothioate linkage
  modified_base 21: mod_base = OTHER; note = 2'-O-methyl modified nucleoside
tacagtgttggtcgatgtatt

SEQ ID NO: 12955 - RNA, 21 nt, synthetic construct
  source 1..21: mol_type = other RNA
  misc_feature 1: note = ETL17 moiety with a phosphorothioate linkage
  modified_base 1: mod_base = OTHER; note = 2'-O-methyl modified nucleoside
  modified_base 2: mod_base = OTHER; note = 2'-O-methyl modified nucleoside
  modified_base 3: mod_base = OTHER; note = 2'-O-methyl modified nucleoside
  modified_base 4: mod_base = OTHER; note = 2'-methoxy ethyl thymidine
  modified_base 5: mod_base = OTHER; note = 2'-O-methyl modified nucleoside
  modified_base 6: mod_base = OTHER; note = 2'-fluoro-modified nucleoside
  modified_base 7: mod_base = OTHER; note = 2'-fluoro-modified nucleoside
  modified_base 8: mod_base = OTHER; note = 2'-fluoro-modified nucleoside
  modified_base 9: mod_base = OTHER; note = 2'-fluoro-modified nucleoside
  modified_base 10: mod_base = OTHER; note = 2'-O-methyl modified nucleoside
  modified_base 11: mod_base = OTHER; note = 2'-O-methyl modified nucleoside
  modified_base 12: mod_base = OTHER; note = 2'-O-methyl modified nucleoside
  modified_base 13: mod_base = OTHER; note = 2'-methoxy ethyl nucleoside
  modified_base 14: mod_base = OTHER; note = 2'-O-methyl modified nucleoside
  modified_base 15: mod_base = OTHER; note = 2'-O-methyl modified nucleoside
  modified_base 16: mod_base = OTHER; note = 2'-O-methyl modified nucleoside
  modified_base 17: mod_base = OTHER; note = 2'-O-methyl modified nucleoside
  modified_base 18: mod_base = OTHER; note = 2'-O-methyl modified nucleoside
  modified_base 19: mod_base = OTHER; note = 2'-O-methyl modified nucleoside with phosphorothioate linkage
  modified_base 20: mod_base = OTHER; note = 2'-O-methyl modified nucleoside with phosphorothioate linkage
  modified_base 21: mod_base = OTHER; note = 2'-O-methyl modified nucleoside
atgtaagcacacaagtgaatt

SEQ ID NO: 12956 - RNA, 21 nt, synthetic construct
  source 1..21: mol_type = other RNA
  misc_feature 1: note = ETL17 moiety with a phosphorothioate linkage
  modified_base 1: mod_base = OTHER; note = 2'-O-methyl modified nucleoside
  modified_base 2: mod_base = OTHER; note = 2'-O-methyl modified nucleoside
  modified_base 3: mod_base = OTHER; note = 2'-O-methyl modified nucleoside
  modified_base 4: mod_base = OTHER; note = 2'-methoxy ethyl thymidine
  modified_base 5: mod_base = OTHER; note = 2'-O-methyl modified nucleoside
  modified_base 6: mod_base = OTHER; note = 2'-fluoro-modified nucleoside
  modified_base 7: mod_base = OTHER; note = 2'-fluoro-modified nucleoside
  modified_base 8: mod_base = OTHER; note = 2'-fluoro-modified nucleoside
  modified_base 9: mod_base = OTHER; note = 2'-fluoro-modified nucleoside
  modified_base 10: mod_base = OTHER; note = 2'-O-methyl modified nucleoside
  modified_base 11: mod_base = OTHER; note = 2'-O-methyl modified nucleoside
  modified_base 12: mod_base = OTHER; note = 2'-O-methyl modified nucleoside
  modified_base 13: mod_base = OTHER; note = 2'-methoxy ethyl nucleoside
  modified_base 14: mod_base = OTHER; note = 2'-O-methyl modified nucleoside
  modified_base 15: mod_base = OTHER; note = 2'-O-methyl modified nucleoside
  modified_base 16: mod_base = OTHER; note = 2'-O-methyl modified nucleoside
  modified_base 17: mod_base = OTHER; note = 2'-O-methyl modified nucleoside
  modified_base 18: mod_base = OTHER; note = 2'-O-methyl modified nucleoside
  modified_base 19: mod_base = OTHER; note = 2'-O-methyl modified nucleoside with phosphorothioate linkage
  modified_base 20: mod_base = OTHER; note = 2'-O-methyl modified nucleoside with phosphorothioate linkage
  modified_base 21: mod_base = OTHER; note = 2'-O-methyl modified nucleoside
tttttcaaccccagtatcatt

SEQ ID NO: 12957 - RNA, 21 nt, synthetic construct
  source 1..21: mol_type = other RNA
  misc_feature 1: note = ETL17 moiety with a phosphorothioate linkage
  modified_base 1: mod_base = OTHER; note = 2'-O-methyl modified nucleoside
  modified_base 2: mod_base = OTHER; note = 2'-O-methyl modified nucleoside
  modified_base 3: mod_base = OTHER; note = 2'-O-methyl modified nucleoside
  modified_base 4: mod_base = OTHER; note = 2'-methoxy ethyl thymidine
  modified_base 5: mod_base = OTHER; note = 2'-O-methyl modified nucleoside
  modified_base 6: mod_base = OTHER; note = 2'-fluoro-modified nucleoside
  modified_base 7: mod_base = OTHER; note = 2'-fluoro-modified nucleoside
  modified_base 8: mod_base = OTHER; note = 2'-fluoro-modified nucleoside
  modified_base 9: mod_base = OTHER; note = 2'-fluoro-modified nucleoside
  modified_base 10: mod_base = OTHER; note = 2'-O-methyl modified nucleoside
  modified_base 11: mod_base = OTHER; note = 2'-O-methyl modified nucleoside
  modified_base 12: mod_base = OTHER; note = 2'-O-methyl modified nucleoside
  modified_base 13: mod_base = OTHER; note = 2'-methoxy ethyl nucleoside
  modified_base 14: mod_base = OTHER; note = 2'-O-methyl modified nucleoside
  modified_base 15: mod_base = OTHER; note = 2'-O-methyl modified nucleoside
  modified_base 16: mod_base = OTHER; note = 2'-O-methyl modified nucleoside
  modified_base 17: mod_base = OTHER; note = 2'-O-methyl modified nucleoside
  modified_base 18: mod_base = OTHER; note = 2'-O-methyl modified nucleoside
  modified_base 19: mod_base = OTHER; note = 2'-O-methyl modified nucleoside with phosphorothioate linkage
  modified_base 20: mod_base = OTHER; note = 2'-O-methyl modified nucleoside with phosphorothioate linkage
  modified_base 21: mod_base = OTHER; note = 2'-O-methyl modified nucleoside
ctttttattcaagagcgaatt

SEQ ID NO: 12958 - RNA, 21 nt, synthetic construct
  source 1..21: mol_type = other RNA
  misc_feature 1: note = ETL17 moiety with a phosphorothioate linkage
  modified_base 1: mod_base = OTHER; note = 2'-O-methyl modified nucleoside
  modified_base 2: mod_base = OTHER; note = 2'-O-methyl modified nucleoside
  modified_base 3: mod_base = OTHER; note = 2'-O-methyl modified nucleoside
  modified_base 4: mod_base = OTHER; note = 2'-methoxy ethyl thymidine
  modified_base 5: mod_base = OTHER; note = 2'-O-methyl modified nucleoside
  modified_base 6: mod_base = OTHER; note = 2'-fluoro-modified nucleoside
  modified_base 7: mod_base = OTHER; note = 2'-fluoro-modified nucleoside
  modified_base 8: mod_base = OTHER; note = 2'-fluoro-modified nucleoside
  modified_base 9: mod_base = OTHER; note = 2'-fluoro-modified nucleoside
  modified_base 10: mod_base = OTHER; note = 2'-O-methyl modified nucleoside
  modified_base 11: mod_base = OTHER; note = 2'-O-methyl modified nucleoside
  modified_base 12: mod_base = OTHER; note = 2'-O-methyl modified nucleoside
  modified_base 13: mod_base = OTHER; note = 2'-methoxy ethyl nucleoside
  modified_base 14: mod_base = OTHER; note = 2'-O-methyl modified nucleoside
  modified_base 15: mod_base = OTHER; note = 2'-O-methyl modified nucleoside
  modified_base 16: mod_base = OTHER; note = 2'-O-methyl modified nucleoside
  modified_base 17: mod_base = OTHER; note = 2'-O-methyl modified nucleoside
  modified_base 18: mod_base = OTHER; note = 2'-O-methyl modified nucleoside
  modified_base 19: mod_base = OTHER; note = 2'-O-methyl modified nucleoside with phosphorothioate linkage
  modified_base 20: mod_base = OTHER; note = 2'-O-methyl modified nucleoside with phosphorothioate linkage
  modified_base 21: mod_base = OTHER; note = 2'-O-methyl modified nucleoside
tattcaagagcgagatgtatt

SEQ ID NO: 12959 - RNA, 21 nt, synthetic construct
  source 1..21: mol_type = other RNA
  misc_feature 1: note = ETL17 moiety with a phosphorothioate linkage
  modified_base 1: mod_base = OTHER; note = 2'-O-methyl modified nucleoside
  modified_base 2: mod_base = OTHER; note = 2'-O-methyl modified nucleoside
  modified_base 3: mod_base = OTHER; note = 2'-O-methyl modified nucleoside
  modified_base 4: mod_base = OTHER; note = 2'-methoxy ethyl thymidine
  modified_base 5: mod_base = OTHER; note = 2'-O-methyl modified nucleoside
  modified_base 6: mod_base = OTHER; note = 2'-fluoro-modified nucleoside
  modified_base 7: mod_base = OTHER; note = 2'-fluoro-modified nucleoside
  modified_base 8: mod_base = OTHER; note = 2'-fluoro-modified nucleoside
  modified_base 9: mod_base = OTHER; note = 2'-fluoro-modified nucleoside
  modified_base 10: mod_base = OTHER; note = 2'-O-methyl modified nucleoside
  modified_base 11: mod_base = OTHER; note = 2'-O-methyl modified nucleoside
  modified_base 12: mod_base = OTHER; note = 2'-O-methyl modified nucleoside
  modified_base 13: mod_base = OTHER; note = 2'-methoxy ethyl nucleoside
  modified_base 14: mod_base = OTHER; note = 2'-O-methyl modified nucleoside
  modified_base 15: mod_base = OTHER; note = 2'-O-methyl modified nucleoside
  modified_base 16: mod_base = OTHER; note = 2'-O-methyl modified nucleoside
  modified_base 17: mod_base = OTHER; note = 2'-O-methyl modified nucleoside
  modified_base 18: mod_base = OTHER; note = 2'-O-methyl modified nucleoside
  modified_base 19: mod_base = OTHER; note = 2'-O-methyl modified nucleoside with phosphorothioate linkage
  modified_base 20: mod_base = OTHER; note = 2'-O-methyl modified nucleoside with phosphorothioate linkage
  modified_base 21: mod_base = OTHER; note = 2'-O-methyl modified nucleoside
cattgcttcaggcaataaatt

SEQ ID NO: 12960 - RNA, 21 nt, synthetic construct
  source 1..21: mol_type = other RNA
  misc_feature 1: note = ETL17 moiety with a phosphorothioate linkage
  modified_base 1: mod_base = OTHER; note = 2'-O-methyl modified nucleoside
  modified_base 2: mod_base = OTHER; note = 2'-O-methyl modified nucleoside
  modified_base 3: mod_base = OTHER; note = 2'-O-methyl modified nucleoside
  modified_base 4: mod_base = OTHER; note = 2'-methoxy ethyl thymidine
  modified_base 5: mod_base = OTHER; note = 2'-O-methyl modified nucleoside
  modified_base 6: mod_base = OTHER; note = 2'-fluoro-modified nucleoside
  modified_base 7: mod_base = OTHER; note = 2'-fluoro-modified nucleoside
  modified_base 8: mod_base = OTHER; note = 2'-fluoro-modified nucleoside
  modified_base 9: mod_base = OTHER; note = 2'-fluoro-modified nucleoside
  modified_base 10: mod_base = OTHER; note = 2'-O-methyl modified nucleoside
  modified_base 11: mod_base = OTHER; note = 2'-O-methyl modified nucleoside
  modified_base 12: mod_base = OTHER; note = 2'-O-methyl modified nucleoside
  modified_base 13: mod_base = OTHER; note = 2'-methoxy ethyl nucleoside
  modified_base 14: mod_base = OTHER; note = 2'-O-methyl modified nucleoside
  modified_base 15: mod_base = OTHER; note = 2'-O-methyl modified nucleoside
  modified_base 16: mod_base = OTHER; note = 2'-O-methyl modified nucleoside
  modified_base 17: mod_base = OTHER; note = 2'-O-methyl modified nucleoside
  modified_base 18: mod_base = OTHER; note = 2'-O-methyl modified nucleoside
  modified_base 19: mod_base = OTHER; note = 2'-O-methyl modified nucleoside with phosphorothioate linkage
  modified_base 20: mod_base = OTHER; note = 2'-O-methyl modified nucleoside with phosphorothioate linkage
  modified_base 21: mod_base = OTHER; note = 2'-O-methyl modified nucleoside
aattacttcgacagcagcatt

SEQ ID NO: 12961 - RNA, 21 nt, synthetic construct
  source 1..21: mol_type = other RNA
  misc_feature 1: note = ETL17 moiety with a phosphorothioate linkage
  modified_base 1: mod_base = OTHER; note = 2'-O-methyl modified nucleoside
  modified_base 2: mod_base = OTHER; note = 2'-O-methyl modified nucleoside
  modified_base 3: mod_base = OTHER; note = 2'-O-methyl modified nucleoside
  modified_base 4: mod_base = OTHER; note = 2'-methoxy ethyl nucleoside
  modified_base 5: mod_base = OTHER; note = 2'-O-methyl modified nucleoside
  modified_base 6: mod_base = OTHER; note = 2'-fluoro-modified nucleoside
  modified_base 7: mod_base = OTHER; note = 2'-fluoro-modified nucleoside
  modified_base 8: mod_base = OTHER; note = 2'-fluoro-modified nucleoside
  modified_base 9: mod_base = OTHER; note = 2'-fluoro-modified nucleoside
  modified_base 10: mod_base = OTHER; note = 2'-O-methyl modified nucleoside
  modified_base 11: mod_base = OTHER; note = 2'-O-methyl modified nucleoside
  modified_base 12: mod_base = OTHER; note = 2'-O-methyl modified nucleoside
  modified_base 13: mod_base = OTHER; note = 2'-methoxy ethyl nucleoside
  modified_base 14: mod_base = OTHER; note = 2'-O-methyl modified nucleoside
  modified_base 15: mod_base = OTHER; note = 2'-O-methyl modified nucleoside
  modified_base 16: mod_base = OTHER; note = 2'-O-methyl modified nucleoside
  modified_base 17: mod_base = OTHER; note = 2'-O-methyl modified nucleoside
  modified_base 18: mod_base = OTHER; note = 2'-O-methyl modified nucleoside
  modified_base 19: mod_base = OTHER; note = 2'-O-methyl modified nucleoside with phosphorothioate linkage
  modified_base 20: mod_base = OTHER; note = 2'-O-methyl modified nucleoside with phosphorothioate linkage
  modified_base 21: mod_base = OTHER; note = 2'-O-methyl modified nucleoside
attacttcgacagcagcaatt

SEQ ID NO: 12962 - RNA, 21 nt, synthetic construct
  source 1..21: mol_type = other RNA
  misc_feature 1: note = ETL17 moiety with a phosphorothioate linkage
  modified_base 1: mod_base = OTHER; note = 2'-O-methyl modified nucleoside
  modified_base 2: mod_base = OTHER; note = 2'-O-methyl modified nucleoside
  modified_base 3: mod_base = OTHER; note = 2'-O-methyl modified nucleoside
  modified_base 4: mod_base = OTHER; note = 2'-methoxy ethyl thymidine
  modified_base 5: mod_base = OTHER; note = 2'-O-methyl modified nucleoside
  modified_base 6: mod_base = OTHER; note = 2'-fluoro-modified nucleoside
  modified_base 7: mod_base = OTHER; note = 2'-fluoro-modified nucleoside
  modified_base 8: mod_base = OTHER; note = 2'-fluoro-modified nucleoside
  modified_base 9: mod_base = OTHER; note = 2'-fluoro-modified nucleoside
  modified_base 10: mod_base = OTHER; note = 2'-O-methyl modified nucleoside
  modified_base 11: mod_base = OTHER; note = 2'-O-methyl modified nucleoside
  modified_base 12: mod_base = OTHER; note = 2'-O-methyl modified nucleoside
  modified_base 13: mod_base = OTHER; note = 2'-methoxy ethyl nucleoside
  modified_base 14: mod_base = OTHER; note = 2'-O-methyl modified nucleoside
  modified_base 15: mod_base = OTHER; note = 2'-O-methyl modified nucleoside
  modified_base 16: mod_base = OTHER; note = 2'-O-methyl modified nucleoside
  modified_base 17: mod_base = OTHER; note = 2'-O-methyl modified nucleoside
  modified_base 18: mod_base = OTHER; note = 2'-O-methyl modified nucleoside
  modified_base 19: mod_base = OTHER; note = 2'-O-methyl modified nucleoside with phosphorothioate linkage
  modified_base 20: mod_base = OTHER; note = 2'-O-methyl modified nucleoside with phosphorothioate linkage
  modified_base 21: mod_base = OTHER; note = 2'-O-methyl modified nucleoside
cttttgtcagttgtggtaatt

SEQ ID NO: 12963 - RNA, 21 nt, synthetic construct
  source 1..21: mol_type = other RNA
  misc_feature 1: note = ETL17 moiety with a phosphorothioate linkage
  modified_base 1: mod_base = OTHER; note = 2'-O-methyl modified nucleoside
  modified_base 2: mod_base = OTHER; note = 2'-O-methyl modified nucleoside
  modified_base 3: mod_base = OTHER; note = 2'-O-methyl modified nucleoside
  modified_base 4: mod_base = OTHER; note = 2'-methoxy ethyl nucleoside
  modified_base 5: mod_base = OTHER; note = 2'-O-methyl modified nucleoside
  modified_base 6: mod_base = OTHER; note = 2'-fluoro-modified nucleoside
  modified_base 7: mod_base = OTHER; note = 2'-fluoro-modified nucleoside
  modified_base 8: mod_base = OTHER; note = 2'-fluoro-modified nucleoside
  modified_base 9: mod_base = OTHER; note = 2'-fluoro-modified nucleoside
  modified_base 10: mod_base = OTHER; note = 2'-O-methyl modified nucleoside
  modified_base 11: mod_base = OTHER; note = 2'-O-methyl modified nucleoside
  modified_base 12: mod_base = OTHER; note = 2'-O-methyl modified nucleoside
  modified_base 13: mod_base = OTHER; note = 2'-methoxy ethyl thymidine
  modified_base 14: mod_base = OTHER; note = 2'-O-methyl modified nucleoside
  modified_base 15: mod_base = OTHER; note = 2'-O-methyl modified nucleoside
  modified_base 16: mod_base = OTHER; note = 2'-O-methyl modified nucleoside
  modified_base 17: mod_base = OTHER; note = 2'-O-methyl modified nucleoside
  modified_base 18: mod_base = OTHER; note = 2'-O-methyl modified nucleoside
  modified_base 19: mod_base = OTHER; note = 2'-O-methyl modified nucleoside with phosphorothioate linkage
  modified_base 20: mod_base = OTHER; note = 2'-O-methyl modified nucleoside with phosphorothioate linkage
  modified_base 21: mod_base = OTHER; note = 2'-O-methyl modified nucleoside
cttgataatacctgttggatt

SEQ ID NO: 12964 - RNA, 21 nt, synthetic construct
  source 1..21: mol_type = other RNA
  misc_feature 1: note = ETL17 moiety with a phosphorothioate linkage
  modified_base 1: mod_base = OTHER; note = 2'-O-methyl modified nucleoside
  modified_base 2: mod_base = OTHER; note = 2'-O-methyl modified nucleoside
  modified_base 3: mod_base = OTHER; note = 2'-O-methyl modified nucleoside
  modified_base 4: mod_base = OTHER; note = 2'-methoxy ethyl thymidine
  modified_base 5: mod_base = OTHER; note = 2'-O-methyl modified nucleoside
  modified_base 6: mod_base = OTHER; note = 2'-fluoro-modified nucleoside
  modified_base 7: mod_base = OTHER; note = 2'-fluoro-modified nucleoside
  modified_base 8: mod_base = OTHER; note = 2'-fluoro-modified nucleoside
  modified_base 9: mod_base = OTHER; note = 2'-fluoro-modified nucleoside
  modified_base 10: mod_base = OTHER; note = 2'-O-methyl modified nucleoside
  modified_base 11: mod_base = OTHER; note = 2'-O-methyl modified nucleoside
  modified_base 12: mod_base = OTHER; note = 2'-O-methyl modified nucleoside
  modified_base 13: mod_base = OTHER; note = 2'-methoxy ethyl thymidine
  modified_base 14: mod_base = OTHER; note = 2'-O-methyl modified nucleoside
  modified_base 15: mod_base = OTHER; note = 2'-O-methyl modified nucleoside
  modified_base 16: mod_base = OTHER; note = 2'-O-methyl modified nucleoside
  modified_base 17: mod_base = OTHER; note = 2'-O-methyl modified nucleoside
  modified_base 18: mod_base = OTHER; note = 2'-O-methyl modified nucleoside
  modified_base 19: mod_base = OTHER; note = 2'-O-methyl modified nucleoside with phosphorothioate linkage
  modified_base 20: mod_base = OTHER; note = 2'-O-methyl modified nucleoside with phosphorothioate linkage
  modified_base 21: mod_base = OTHER; note = 2'-O-methyl modified nucleoside
tgataatacctgttggaaatt

SEQ ID NO: 12965 - RNA, 21 nt, synthetic construct
  source 1..21: mol_type = other RNA
  misc_feature 1: note = ETL17 moiety with a phosphorothioate linkage
  modified_base 1: mod_base = OTHER; note = 2'-O-methyl modified nucleoside
  modified_base 2: mod_base = OTHER; note = 2'-O-methyl modified nucleoside
  modified_base 3: mod_base = OTHER; note = 2'-O-methyl modified nucleoside
  modified_base 4: mod_base = OTHER; note = 2'-methoxy ethyl nucleoside
  modified_base 5: mod_base = OTHER; note = 2'-O-methyl modified nucleoside
  modified_base 6: mod_base = OTHER; note = 2'-fluoro-modified nucleoside
  modified_base 7: mod_base = OTHER; note = 2'-fluoro-modified nucleoside
  modified_base 8: mod_base = OTHER; note = 2'-fluoro-modified nucleoside
  modified_base 9: mod_base = OTHER; note = 2'-fluoro-modified nucleoside
  modified_base 10: mod_base = OTHER; note = 2'-O-methyl modified nucleoside
  modified_base 11: mod_base = OTHER; note = 2'-O-methyl modified nucleoside
  modified_base 12: mod_base = OTHER; note = 2'-O-methyl modified nucleoside
  modified_base 13: mod_base = OTHER; note = 2'-methoxy ethyl thymidine
  modified_base 14: mod_base = OTHER; note = 2'-O-methyl modified nucleoside
  modified_base 15: mod_base = OTHER; note = 2'-O-methyl modified nucleoside
  modified_base 16: mod_base = OTHER; note = 2'-O-methyl modified nucleoside
  modified_base 17: mod_base = OTHER; note = 2'-O-methyl modified nucleoside
  modified_base 18: mod_base = OTHER; note = 2'-O-methyl modified nucleoside
  modified_base 19: mod_base = OTHER; note = 2'-O-methyl modified nucleoside with phosphorothioate linkage
  modified_base 20: mod_base = OTHER; note = 2'-O-methyl modified nucleoside with phosphorothioate linkage
  modified_base 21: mod_base = OTHER; note = 2'-O-methyl modified nucleoside
aagaggtgttattagaatatt

SEQ ID NO: 12966 - RNA, 21 nt, synthetic construct
  source 1..21: mol_type = other RNA
  misc_feature 1: note = ETL17 moiety with a phosphorothioate linkage
  modified_base 1: mod_base = OTHER; note = 2'-O-methyl modified nucleoside
  modified_base 2: mod_base = OTHER; note = 2'-O-methyl modified nucleoside
  modified_base 3: mod_base = OTHER; note = 2'-O-methyl modified nucleoside
  modified_base 4: mod_base = OTHER; note = 2'-methoxy ethyl thymidine
  modified_base 5: mod_base = OTHER; note = 2'-O-methyl modified nucleoside
  modified_base 6: mod_base = OTHER; note = 2'-fluoro-modified nucleoside
  modified_base 7: mod_base = OTHER; note = 2'-fluoro-modified nucleoside
  modified_base 8: mod_base = OTHER; note = 2'-fluoro-modified nucleoside
  modified_base 9: mod_base = OTHER; note = 2'-fluoro-modified nucleoside
  modified_base 10: mod_base = OTHER; note = 2'-O-methyl modified nucleoside
  modified_base 11: mod_base = OTHER; note = 2'-O-methyl modified nucleoside
  modified_base 12: mod_base = OTHER; note = 2'-O-methyl modified nucleoside
  modified_base 13: mod_base = OTHER; note = 2'-methoxy ethyl nucleoside
  modified_base 14: mod_base = OTHER; note = 2'-O-methyl modified nucleoside
  modified_base 15: mod_base = OTHER; note = 2'-O-methyl modified nucleoside
  modified_base 16: mod_base = OTHER; note = 2'-O-methyl modified nucleoside
  modified_base 17: mod_base = OTHER; note = 2'-O-methyl modified nucleoside
  modified_base 18: mod_base = OTHER; note = 2'-O-methyl modified nucleoside
  modified_base 19: mod_base = OTHER; note = 2'-O-methyl modified nucleoside with phosphorothioate linkage
  modified_base 20: mod_base = OTHER; note = 2'-O-methyl modified nucleoside with phosphorothioate linkage
  modified_base 21: mod_base = OTHER; note = 2'-O-methyl modified nucleoside
tgttacgaaaaaactatgatt

SEQ ID NO: 12967 - RNA, 21 nt, synthetic construct
  source 1..21: mol_type = other RNA
  misc_feature 1: note = ETL17 moiety with a phosphorothioate linkage
  modified_base 1: mod_base = OTHER; note = 2'-O-methyl modified nucleoside
  modified_base 2: mod_base = OTHER; note = 2'-O-methyl modified nucleoside
  modified_base 3: mod_base = OTHER; note = 2'-O-methyl modified nucleoside
  modified_base 4: mod_base = OTHER; note = 2'-methoxy ethyl thymidine
  modified_base 5: mod_base = OTHER; note = 2'-O-methyl modified nucleoside
  modified_base 6: mod_base = OTHER; note = 2'-fluoro-modified nucleoside
  modified_base 7: mod_base = OTHER; note = 2'-fluoro-modified nucleoside
  modified_base 8: mod_base = OTHER; note = 2'-fluoro-modified nucleoside
  modified_base 9: mod_base = OTHER; note = 2'-fluoro-modified nucleoside
  modified_base 10: mod_base = OTHER; note = 2'-O-methyl modified nucleoside
  modified_base 11: mod_base = OTHER; note = 2'-O-methyl modified nucleoside
  modified_base 12: mod_base = OTHER; note = 2'-O-methyl modified nucleoside
  modified_base 13: mod_base = OTHER; note = 2'-methoxy ethyl nucleoside
  modified_base 14: mod_base = OTHER; note = 2'-O-methyl modified nucleoside
  modified_base 15: mod_base = OTHER; note = 2'-O-methyl modified nucleoside
  modified_base 16: mod_base = OTHER; note = 2'-O-methyl modified nucleoside
  modified_base 17: mod_base = OTHER; note = 2'-O-methyl modified nucleoside
  modified_base 18: mod_base = OTHER; note = 2'-O-methyl modified nucleoside
  modified_base 19: mod_base = OTHER; note = 2'-O-methyl modified nucleoside with phosphorothioate linkage
  modified_base 20: mod_base = OTHER; note = 2'-O-methyl modified nucleoside with phosphorothioate linkage
  modified_base 21: mod_base = OTHER; note = 2'-O-methyl modified nucleoside
atctggctgagcatattcatt

SEQ ID NO: 12968 - RNA, 21 nt, synthetic construct
  source 1..21: mol_type = other RNA
  misc_feature 1: note = ETL17 moiety with a phosphorothioate linkage
  modified_base 1: mod_base = OTHER; note = 2'-O-methyl modified nucleoside
  modified_base 2: mod_base = OTHER; note = 2'-O-methyl modified nucleoside
  modified_base 3: mod_base = OTHER; note = 2'-O-methyl modified nucleoside
  modified_base 4: mod_base = OTHER; note = 2'-methoxy ethyl thymidine
  modified_base 5: mod_base = OTHER; note = 2'-O-methyl modified nucleoside
  modified_base 6: mod_base = OTHER; note = 2'-fluoro-modified nucleoside
  modified_base 7: mod_base = OTHER; note = 2'-fluoro-modified nucleoside
  modified_base 8: mod_base = OTHER; note = 2'-fluoro-modified nucleoside
  modified_base 9: mod_base = OTHER; note = 2'-fluoro-modified nucleoside
  modified_base 10: mod_base = OTHER; note = 2'-O-methyl modified nucleoside
  modified_base 11: mod_base = OTHER; note = 2'-O-methyl modified nucleoside
  modified_base 12: mod_base = OTHER; note = 2'-O-methyl modified nucleoside
  modified_base 13: mod_base = OTHER; note = 2'-methoxy ethyl nucleoside
  modified_base 14: mod_base = OTHER; note = 2'-O-methyl modified nucleoside
  modified_base 15: mod_base = OTHER; note = 2'-O-methyl modified nucleoside
  modified_base 16: mod_base = OTHER; note = 2'-O-methyl modified nucleoside
  modified_base 17: mod_base = OTHER; note = 2'-O-methyl modified nucleoside
  modified_base 18: mod_base = OTHER; note = 2'-O-methyl modified nucleoside
  modified_base 19: mod_base = OTHER; note = 2'-O-methyl modified nucleoside with phosphorothioate linkage
  modified_base 20: mod_base = OTHER; note = 2'-O-methyl modified nucleoside with phosphorothioate linkage
  modified_base 21: mod_base = OTHER; note = 2'-O-methyl modified nucleoside
ctattcactgctagcaagatt

SEQ ID NO: 12969 - RNA, 21 nt, synthetic construct
  source 1..21: mol_type = other RNA
  misc_feature 1: note = ETL17 moiety with a phosphorothioate linkage
  modified_base 1: mod_base = OTHER; note = 2'-O-methyl modified nucleoside
  modified_base 2: mod_base = OTHER; note = 2'-O-methyl modified nucleoside
  modified_base 3: mod_base = OTHER; note = 2'-O-methyl modified nucleoside
  modified_base 4: mod_base = OTHER; note = 2'-methoxy ethyl thymidine
  modified_base 5: mod_base = OTHER; note = 2'-O-methyl modified nucleoside
  modified_base 6: mod_base = OTHER; note = 2'-fluoro-modified nucleoside
  modified_base 7: mod_base = OTHER; note = 2'-fluoro-modified nucleoside
  modified_base 8: mod_base = OTHER; note = 2'-fluoro-modified nucleoside
  modified_base 9: mod_base = OTHER; note = 2'-fluoro-modified nucleoside
  modified_base 10: mod_base = OTHER; note = 2'-O-methyl modified nucleoside
  modified_base 11: mod_base = OTHER; note = 2'-O-methyl modified nucleoside
  modified_base 12: mod_base = OTHER; note = 2'-O-methyl modified nucleoside
  modified_base 13: mod_base = OTHER; note = 2'-methoxy ethyl nucleoside
  modified_base 14: mod_base = OTHER; note = 2'-O-methyl modified nucleoside
  modified_base 15: mod_base = OTHER; note = 2'-O-methyl modified nucleoside
  modified_base 16: mod_base = OTHER; note = 2'-O-methyl modified nucleoside
  modified_base 17: mod_base = OTHER; note = 2'-O-methyl modified nucleoside
  modified_base 18: mod_base = OTHER; note = 2'-O-methyl modified nucleoside
  modified_base 19: mod_base = OTHER; note = 2'-O-methyl modified nucleoside with phosphorothioate linkage
  modified_base 20: mod_base = OTHER; note = 2'-O-methyl modified nucleoside with phosphorothioate linkage
  modified_base 21: mod_base = OTHER; note = 2'-O-methyl modified nucleoside
tagtaatgcatgccatacatt

SEQ ID NO: 12970 - RNA, 21 nt, synthetic construct
  source 1..21: mol_type = other RNA
  misc_feature 1: note = ETL17 moiety with a phosphorothioate linkage
  modified_base 1: mod_base = OTHER; note = 2'-O-methyl modified nucleoside
  modified_base 2: mod_base = OTHER; note = 2'-O-methyl modified nucleoside
  modified_base 3: mod_base = OTHER; note = 2'-O-methyl modified nucleoside
  modified_base 4: mod_base = OTHER; note = 2'-methoxy ethyl nucleoside
  modified_base 5: mod_base = OTHER; note = 2'-O-methyl modified nucleoside
  modified_base 6: mod_base = OTHER; note = 2'-fluoro-modified nucleoside
  modified_base 7: mod_base = OTHER; note = 2'-fluoro-modified nucleoside
  modified_base 8: mod_base = OTHER; note = 2'-fluoro-modified nucleoside
  modified_base 9: mod_base = OTHER; note = 2'-fluoro-modified nucleoside
  modified_base 10: mod_base = OTHER; note = 2'-O-methyl modified nucleoside
  modified_base 11: mod_base = OTHER; note = 2'-O-methyl modified nucleoside
  modified_base 12: mod_base = OTHER; note = 2'-O-methyl modified nucleoside
  modified_base 13: mod_base = OTHER; note = 2'-methoxy ethyl nucleoside
  modified_base 14: mod_base = OTHER; note = 2'-O-methyl modified nucleoside
  modified_base 15: mod_base = OTHER; note = 2'-O-methyl modified nucleoside
  modified_base 16: mod_base = OTHER; note = 2'-O-methyl modified nucleoside
  modified_base 17: mod_base = OTHER; note = 2'-O-methyl modified nucleoside
  modified_base 18: mod_base = OTHER; note = 2'-O-methyl modified nucleoside
  modified_base 19: mod_base = OTHER; note = 2'-O-methyl modified nucleoside with phosphorothioate linkage
  modified_base 20: mod_base = OTHER; note = 2'-O-methyl modified nucleoside with phosphorothioate linkage
  modified_base 21: mod_base = OTHER; note = 2'-O-methyl modified nucleoside
aatggggtacttcatgtcatt

SEQ ID NO: 12971 - RNA, 21 nt, synthetic construct
  source 1..21: mol_type = other RNA
  misc_feature 1: note = ETL17 moiety with a phosphorothioate linkage
  modified_base 1: mod_base = OTHER; note = 2'-O-methyl modified nucleoside
  modified_base 2: mod_base = OTHER; note = 2'-O-methyl modified nucleoside
  modified_base 3: mod_base = OTHER; note = 2'-O-methyl modified nucleoside
  modified_base 4: mod_base = OTHER; note = 2'-methoxy ethyl nucleoside
  modified_base 5: mod_base = OTHER; note = 2'-O-methyl modified nucleoside
  modified_base 6: mod_base = OTHER; note = 2'-fluoro-modified nucleoside
  modified_base 7: mod_base = OTHER; note = 2'-fluoro-modified nucleoside
  modified_base 8: mod_base = OTHER; note = 2'-fluoro-modified nucleoside
  modified_base 9: mod_base = OTHER; note = 2'-fluoro-modified nucleoside
  modified_base 10: mod_base = OTHER; note = 2'-O-methyl modified nucleoside
  modified_base 11: mod_base = OTHER; note = 2'-O-methyl modified nucleoside
  modified_base 12: mod_base = OTHER; note = 2'-O-methyl modified nucleoside
  modified_base 13: mod_base = OTHER; note = 2'-methoxy ethyl nucleoside
  modified_base 14: mod_base = OTHER; note = 2'-O-methyl modified nucleoside
  modified_base 15: mod_base = OTHER; note = 2'-O-methyl modified nucleoside
  modified_base 16: mod_base = OTHER; note = 2'-O-methyl modified nucleoside
  modified_base 17: mod_base = OTHER; note = 2'-O-methyl modified nucleoside
  modified_base 18: mod_base = OTHER; note = 2'-O-methyl modified nucleoside
  modified_base 19: mod_base = OTHER; note = 2'-O-methyl modified nucleoside with phosphorothioate linkage
  modified_base 20: mod_base = OTHER; note = 2'-O-methyl modified nucleoside with phosphorothioate linkage
  modified_base 21: mod_base = OTHER; note = 2'-O-methyl modified nucleoside
aggaaagtttatccagtaatt

SEQ ID NO: 12972 - RNA, 21 nt, synthetic construct
  source 1..21: mol_type = other RNA
  misc_feature 1: note = ETL17 moiety with a phosphorothioate linkage
  modified_base 1: mod_base = OTHER; note = 2'-O-methyl modified nucleoside
  modified_base 2: mod_base = OTHER; note = 2'-O-methyl modified nucleoside
  modified_base 3: mod_base = OTHER; note = 2'-O-methyl modified nucleoside
  modified_base 4: mod_base = OTHER; note = 2'-methoxy ethyl nucleoside
  modified_base 5: mod_base = OTHER; note = 2'-O-methyl modified nucleoside
  modified_base 6: mod_base = OTHER; note = 2'-fluoro-modified nucleoside
  modified_base 7: mod_base = OTHER; note = 2'-fluoro-modified nucleoside
  modified_base 8: mod_base = OTHER; note = 2'-fluoro-modified nucleoside
  modified_base 9: mod_base = OTHER; note = 2'-fluoro-modified nucleoside
  modified_base 10: mod_base = OTHER; note = 2'-O-methyl modified nucleoside
  modified_base 11: mod_base = OTHER; note = 2'-O-methyl modified nucleoside
  modified_base 12: mod_base = OTHER; note = 2'-O-methyl modified nucleoside
  modified_base 13: mod_base = OTHER; note = 2'-methoxy ethyl nucleoside
  modified_base 14: mod_base = OTHER; note = 2'-O-methyl modified nucleoside
  modified_base 15: mod_base = OTHER; note = 2'-O-methyl modified nucleoside
  modified_base 16: mod_base = OTHER; note = 2'-O-methyl modified nucleoside
  modified_base 17: mod_base = OTHER; note = 2'-O-methyl modified nucleoside
  modified_base 18: mod_base = OTHER; note = 2'-O-methyl modified nucleoside
  modified_base 19: mod_base = OTHER; note = 2'-O-methyl modified nucleoside with phosphorothioate linkage
  modified_base 20: mod_base = OTHER; note = 2'-O-methyl modified nucleoside with phosphorothioate linkage
  modified_base 21: mod_base = OTHER; note = 2'-O-methyl modified nucleoside
tctgcaaaagttgcacaaatt

SEQ ID NO: 12973 - RNA, 21 nt, synthetic construct
  source 1..21: mol_type = other RNA
  misc_feature 1: note = ETL17 moiety with a phosphorothioate linkage
  modified_base 1: mod_base = OTHER; note = 2'-O-methyl modified nucleoside
  modified_base 2: mod_base = OTHER; note = 2'-O-methyl modified nucleoside
  modified_base 3: mod_base = OTHER; note = 2'-O-methyl modified nucleoside
  modified_base 4: mod_base = OTHER; note = 2'-O-methyl modified nucleoside
  modified_base 5: mod_base = OTHER; note = 2'-fluoro-modified nucleoside
  modified_base 6: mod_base = OTHER; note = 2'-O-methyl modified nucleoside
  modified_base 7: mod_base = OTHER; note = 2'-fluoro-modified nucleoside
  modified_base 8: mod_base = OTHER; note = 2'-O-methyl modified nucleoside
  modified_base 9: mod_base = OTHER; note = 2'-fluoro-modified nucleoside
  modified_base 10: mod_base = OTHER; note = 2'-O-methyl modified nucleoside
  modified_base 11: mod_base = OTHER; note = 2'-O-methyl modified nucleoside
  modified_base 12: mod_base = OTHER; note = 2'-O-methyl modified nucleoside
  modified_base 13: mod_base = OTHER; note = 2'-O-methyl modified nucleoside
  modified_base 14: mod_base = OTHER; note = 2'-O-methyl modified nucleoside
  modified_base 15: mod_base = OTHER; note = 2'-O-methyl modified nucleoside
  modified_base 16: mod_base = OTHER; note = 2'-O-methyl modified nucleoside
  modified_base 17: mod_base = OTHER; note = 2'-O-methyl modified nucleoside
  modified_base 18: mod_base = OTHER; note = 2'-O-methyl modified nucleoside
  modified_base 19: mod_base = OTHER; note = 2'-O-methyl modified nucleoside with phosphorothioate linkage
  modified_base 20: mod_base = OTHER; note = 2'-O-methyl modified nucleoside with phosphorothioate linkage
  modified_base 21: mod_base = OTHER; note = 2'-O-methyl modified nucleoside
caatagacgtttcttatcatt

SEQ ID NO: 12974 - RNA, 21 nt, synthetic construct
  source 1..21: mol_type = other RNA
  misc_feature 1: note = ETL17 moiety with a phosphorothioate linkage
  modified_base 1: mod_base = OTHER; note = 2'-O-methyl modified nucleoside
  modified_base 2: mod_base = OTHER; note = 2'-O-methyl modified nucleoside
  modified_base 3: mod_base = OTHER; note = 2'-O-methyl modified nucleoside
  modified_base 4: mod_base = OTHER; note = 2'-O-methyl modified nucleoside
  modified_base 5: mod_base = OTHER; note = 2'-fluoro-modified nucleoside
  modified_base 6: mod_base = OTHER; note = 2'-O-methyl modified nucleoside
  modified_base 7: mod_base = OTHER; note = 2'-fluoro-modified nucleoside
  modified_base 8: mod_base = OTHER; note = 2'-O-methyl modified nucleoside
  modified_base 9: mod_base = OTHER; note = 2'-fluoro-modified nucleoside
  modified_base 10: mod_base = OTHER; note = 2'-O-methyl modified nucleoside
  modified_base 11: mod_base = OTHER; note = 2'-O-methyl modified nucleoside
  modified_base 12: mod_base = OTHER; note = 2'-O-methyl modified nucleoside
  modified_base 13: mod_base = OTHER; note = 2'-O-methyl modified nucleoside
  modified_base 14: mod_base = OTHER; note = 2'-O-methyl modified nucleoside
  modified_base 15: mod_base = OTHER; note = 2'-O-methyl modified nucleoside
  modified_base 16: mod_base = OTHER; note = 2'-O-methyl modified nucleoside
  modified_base 17: mod_base = OTHER; note = 2'-O-methyl modified nucleoside
  modified_base 18: mod_base = OTHER; note = 2'-O-methyl modified nucleoside
  modified_base 19: mod_base = OTHER; note = 2'-O-methyl modified nucleoside with phosphorothioate linkage
  modified_base 20: mod_base = OTHER; note = 2'-O-methyl modified nucleoside with phosphorothioate linkage
  modified_base 21: mod_base = OTHER; note = 2'-O-methyl modified nucleoside
caatagacgtttcttatcatt

SEQ ID NO: 12975 - RNA, 21 nt, synthetic construct
  source 1..21: mol_type = other RNA
  modified_base 1: mod_base = OTHER; note = 2'-O-methyl modified nucleoside with phosphorothioate linkage
  modified_base 2: mod_base = OTHER; note = 2'-fluoro-modified nucleoside with phosphorothioate linkage
  modified_base 3: mod_base = OTHER; note = 2'-O-methyl modified nucleoside
  modified_base 4: mod_base = OTHER; note = 2'-fluoro-modified nucleoside
  modified_base 5: mod_base = OTHER; note = 2'-O-methyl modified nucleoside
  modified_base 6: mod_base = OTHER; note = 2'-fluoro-modified nucleoside
  modified_base 7: mod_base = OTHER; note = 2'-O-methyl modified nucleoside
  modified_base 8: mod_base = OTHER; note = 2'-fluoro-modified nucleoside
  modified_base 9: mod_base = OTHER; note = 2'-O-methyl modified nucleoside
  modified_base 10: mod_base = OTHER; note = 2'-fluoro-modified nucleoside
  modified_base 11: mod_base = OTHER; note = 2'-O-methyl modified nucleoside
  modified_base 12: mod_base = OTHER; note = 2'-fluoro-modified nucleoside
  modified_base 13: mod_base = OTHER; note = 2'-O-methyl modified nucleoside
  modified_base 14: mod_base = OTHER; note = 2'-fluoro-modified nucleoside
  modified_base 15: mod_base = OTHER; note = 2'-O-methyl modified nucleoside
  modified_base 16: mod_base = OTHER; note = 2'-fluoro-modified nucleoside
  modified_base 17: mod_base = OTHER; note = 2'-O-methyl modified nucleoside
  modified_base 18: mod_base = OTHER; note = 2'-fluoro-modified nucleoside
  modified_base 19: mod_base = OTHER; note = 2'-O-methyl modified nucleoside with phosphorothioate linkage
  modified_base 20: mod_base = OTHER; note = 2'-O-methyl modified nucleoside with phosphorothioate linkage
  modified_base 21: mod_base = OTHER; note = 2'-O-methyl modified nucleoside
tccaacactgtattctgattt

SEQ ID NO: 12976 - RNA, 21 nt, synthetic construct
  source 1..21: mol_type = other RNA
  modified_base 1: mod_base = OTHER; note = 2'-O-methyl modified nucleoside with phosphorothioate linkage
  modified_base 2: mod_base = OTHER; note = 2'-fluoro-modified nucleoside with phosphorothioate linkage
  modified_base 3: mod_base = OTHER; note = 2'-O-methyl modified nucleoside
  modified_base 4: mod_base = OTHER; note = 2'-fluoro-modified nucleoside
  modified_base 5: mod_base = OTHER; note = 2'-O-methyl modified nucleoside
  modified_base 6: mod_base = OTHER; note = 2'-fluoro-modified nucleoside
  modified_base 7: mod_base = OTHER; note = 2'-O-methyl modified nucleoside
  modified_base 8: mod_base = OTHER; note = 2'-fluoro-modified nucleoside
  modified_base 9: mod_base = OTHER; note = 2'-O-methyl modified nucleoside
  modified_base 10: mod_base = OTHER; note = 2'-fluoro-modified nucleoside
  modified_base 11: mod_base = OTHER; note = 2'-O-methyl modified nucleoside
  modified_base 12: mod_base = OTHER; note = 2'-fluoro-modified nucleoside
  modified_base 13: mod_base = OTHER; note = 2'-O-methyl modified nucleoside
  modified_base 14: mod_base = OTHER; note = 2'-fluoro-modified nucleoside
  modified_base 15: mod_base = OTHER; note = 2'-O-methyl modified nucleoside
  modified_base 16: mod_base = OTHER; note = 2'-fluoro-modified nucleoside
  modified_base 17: mod_base = OTHER; note = 2'-O-methyl modified nucleoside
  modified_base 18: mod_base = OTHER; note = 2'-fluoro-modified nucleoside
  modified_base 19: mod_base = OTHER; note = 2'-O-methyl modified nucleoside with phosphorothioate linkage
  modified_base 20: mod_base = OTHER; note = 2'-O-methyl modified nucleoside with phosphorothioate linkage
  modified_base 21: mod_base = OTHER; note = 2'-O-methyl modified nucleoside
ttcgaccaacactgtattctt

SEQ ID NO: 12977 - RNA, 21 nt, synthetic construct
  source 1..21: mol_type = other RNA
  modified_base 1: mod_base = OTHER; note = 2'-O-methyl modified nucleoside with phosphorothioate linkage
  modified_base 2: mod_base = OTHER; note = 2'-fluoro-modified nucleoside with phosphorothioate linkage
  modified_base 3: mod_base = OTHER; note = 2'-O-methyl modified nucleoside
  modified_base 4: mod_base = OTHER; note = 2'-fluoro-modified nucleoside
  modified_base 5: mod_base = OTHER; note = 2'-O-methyl modified nucleoside
  modified_base 6: mod_base = OTHER; note = 2'-fluoro-modified nucleoside
  modified_base 7: mod_base = OTHER; note = 2'-O-methyl modified nucleoside
  modified_base 8: mod_base = OTHER; note = 2'-fluoro-modified nucleoside
  modified_base 9: mod_base = OTHER; note = 2'-O-methyl modified nucleoside
  modified_base 10: mod_base = OTHER; note = 2'-fluoro-modified nucleoside
  modified_base 11: mod_base = OTHER; note = 2'-O-methyl modified nucleoside
  modified_base 12: mod_base = OTHER; note = 2'-fluoro-modified nucleoside
  modified_base 13: mod_base = OTHER; note = 2'-O-methyl modified nucleoside
  modified_base 14: mod_base = OTHER; note = 2'-fluoro-modified nucleoside
  modified_base 15: mod_base = OTHER; note = 2'-O-methyl modified nucleoside
  modified_base 16: mod_base = OTHER; note = 2'-fluoro-modified nucleoside
  modified_base 17: mod_base = OTHER; note = 2'-O-methyl modified nucleoside
  modified_base 18: mod_base = OTHER; note = 2'-fluoro-modified nucleoside
  modified_base 19: mod_base = OTHER; note = 2'-O-methyl modified nucleoside with phosphorothioate linkage
  modified_base 20: mod_base = OTHER; note = 2'-O-methyl modified nucleoside with phosphorothioate linkage
  modified_base 21: mod_base = OTHER; note = 2'-O-methyl modified nucleoside
tcattccgcaaacccaaagtt

SEQ ID NO: 12978 - RNA, 21 nt, synthetic construct
  source 1..21: mol_type = other RNA
  modified_base 1: mod_base = OTHER; note = 2'-O-methyl modified nucleoside with phosphorothioate linkage
  modified_base 2: mod_base = OTHER; note = 2'-fluoro-modified nucleoside with phosphorothioate linkage
  modified_base 3: mod_base = OTHER; note = 2'-O-methyl modified nucleoside
  modified_base 4: mod_base = OTHER; note = 2'-fluoro-modified nucleoside
  modified_base 5: mod_base = OTHER; note = 2'-O-methyl modified nucleoside
  modified_base 6: mod_base = OTHER; note = 2'-fluoro-modified nucleoside
  modified_base 7: mod_base = OTHER; note = 2'-O-methyl modified nucleoside
  modified_base 8: mod_base = OTHER; note = 2'-fluoro-modified nucleoside
  modified_base 9: mod_base = OTHER; note = 2'-O-methyl modified nucleoside
  modified_base 10: mod_base = OTHER; note = 2'-fluoro-modified nucleoside
  modified_base 11: mod_base = OTHER; note = 2'-O-methyl modified nucleoside
  modified_base 12: mod_base = OTHER; note = 2'-fluoro-modified nucleoside
  modified_base 13: mod_base = OTHER; note = 2'-O-methyl modified nucleoside
  modified_base 14: mod_base = OTHER; note = 2'-fluoro-modified nucleoside
  modified_base 15: mod_base = OTHER; note = 2'-O-methyl modified nucleoside
  modified_base 16: mod_base = OTHER; note = 2'-fluoro-modified nucleoside
  modified_base 17: mod_base = OTHER; note = 2'-O-methyl modified nucleoside
  modified_base 18: mod_base = OTHER; note = 2'-fluoro-modified nucleoside
  modified_base 19: mod_base = OTHER; note = 2'-O-methyl modified nucleoside with phosphorothioate linkage
  modified_base 20: mod_base = OTHER; note = 2'-O-methyl modified nucleoside with phosphorothioate linkage
  modified_base 21: mod_base = OTHER; note = 2'-O-methyl modified nucleoside
ttggcaaacatgcccttattt

SEQ ID NO: 12979 - RNA, 21 nt, synthetic construct
  source 1..21: mol_type = other RNA
  modified_base 1: mod_base = OTHER; note = 2'-O-methyl modified nucleoside with phosphorothioate linkage
  modified_base 2: mod_base = OTHER; note = 2'-fluoro-modified nucleoside with phosphorothioate linkage
  modified_base 3: mod_base = OTHER; note = 2'-O-methyl modified nucleoside
  modified_base 4: mod_base = OTHER; note = 2'-fluoro-modified nucleoside
  modified_base 5: mod_base = OTHER; note = 2'-O-methyl modified nucleoside
  modified_base 6: mod_base = OTHER; note = 2'-fluoro-modified nucleoside
  modified_base 7: mod_base = OTHER; note = 2'-O-methyl modified nucleoside
  modified_base 8: mod_base = OTHER; note = 2'-fluoro-modified nucleoside
  modified_base 9: mod_base = OTHER; note = 2'-O-methyl modified nucleoside
  modified_base 10: mod_base = OTHER; note = 2'-fluoro-modified nucleoside
  modified_base 11: mod_base = OTHER; note = 2'-O-methyl modified nucleoside
  modified_base 12: mod_base = OTHER; note = 2'-fluoro-modified nucleoside
  modified_base 13: mod_base = OTHER; note = 2'-O-methyl modified nucleoside
  modified_base 14: mod_base = OTHER; note = 2'-fluoro-modified nucleoside
  modified_base 15: mod_base = OTHER; note = 2'-O-methyl modified nucleoside
  modified_base 16: mod_base = OTHER; note = 2'-fluoro-modified nucleoside
  modified_base 17: mod_base = OTHER; note = 2'-O-methyl modified nucleoside
  modified_base 18: mod_base = OTHER; note = 2'-fluoro-modified nucleoside
  modified_base 19: mod_base = OTHER; note = 2'-O-methyl modified nucleoside with phosphorothioate linkage
  modified_base 20: mod_base = OTHER; note = 2'-O-methyl modified nucleoside with phosphorothioate linkage
  modified_base 21: mod_base = OTHER; note = 2'-O-methyl modified nucleoside
tttcgtctcagttgcagcttt

SEQ ID NO: 12980 - RNA, 21 nt, synthetic construct
  source 1..21: mol_type = other RNA
  modified_base 1: mod_base = OTHER; note = 2'-O-methyl modified nucleoside with phosphorothioate linkage
  modified_base 2: mod_base = OTHER; note = 2'-fluoro-modified nucleoside with phosphorothioate linkage
  modified_base 3: mod_base = OTHER; note = 2'-O-methyl modified nucleoside
  modified_base 4: mod_base = OTHER; note = 2'-fluoro-modified nucleoside
  modified_base 5: mod_base = OTHER; note = 2'-O-methyl modified nucleoside
  modified_base 6: mod_base = OTHER; note = 2'-fluoro-modified nucleoside
  modified_base 7: mod_base = OTHER; note = 2'-O-methyl modified nucleoside
  modified_base 8: mod_base = OTHER; note = 2'-fluoro-modified nucleoside
  modified_base 9: mod_base = OTHER; note = 2'-O-methyl modified nucleoside
  modified_base 10: mod_base = OTHER; note = 2'-fluoro-modified nucleoside
  modified_base 11: mod_base = OTHER; note = 2'-O-methyl modified nucleoside
  modified_base 12: mod_base = OTHER; note = 2'-fluoro-modified nucleoside
  modified_base 13: mod_base = OTHER; note = 2'-O-methyl modified nucleoside
  modified_base 14: mod_base = OTHER; note = 2'-fluoro-modified nucleoside
  modified_base 15: mod_base = OTHER; note = 2'-O-methyl modified nucleoside
  modified_base 16: mod_base = OTHER; note = 2'-fluoro-modified nucleoside
  modified_base 17: mod_base = OTHER; note = 2'-O-methyl modified nucleoside
  modified_base 18: mod_base = OTHER; note = 2'-fluoro-modified nucleoside
  modified_base 19: mod_base = OTHER; note = 2'-O-methyl modified nucleoside with phosphorothioate linkage
  modified_base 20: mod_base = OTHER; note = 2'-O-methyl modified nucleoside with phosphorothioate linkage
  modified_base 21: mod_base = OTHER; note = 2'-O-methyl modified nucleoside
tgatctatgaactggtagatt

SEQ ID NO: 12981 - RNA, 21 nt, synthetic construct
  source 1..21: mol_type = other RNA
  modified_base 1: mod_base = OTHER; note = 2'-O-methyl modified nucleoside with phosphorothioate linkage
  modified_base 2: mod_base = OTHER; note = 2'-fluoro-modified nucleoside with phosphorothioate linkage
  modified_base 3: mod_base = OTHER; note = 2'-O-methyl modified nucleoside
  modified_base 4: mod_base = OTHER; note = 2'-fluoro-modified nucleoside
  modified_base 5: mod_base = OTHER; note = 2'-O-methyl modified nucleoside
  modified_base 6: mod_base = OTHER; note = 2'-fluoro-modified nucleoside
  modified_base 7: mod_base = OTHER; note = 2'-O-methyl modified nucleoside
  modified_base 8: mod_base = OTHER; note = 2'-fluoro-modified nucleoside
  modified_base 9: mod_base = OTHER; note = 2'-O-methyl modified nucleoside
  modified_base 10: mod_base = OTHER; note = 2'-fluoro-modified nucleoside
  modified_base 11: mod_base = OTHER; note = 2'-O-methyl modified nucleoside
  modified_base 12: mod_base = OTHER; note = 2'-fluoro-modified nucleoside
  modified_base 13: mod_base = OTHER; note = 2'-O-methyl modified nucleoside
  modified_base 14: mod_base = OTHER; note = 2'-fluoro-modified nucleoside
  modified_base 15: mod_base = OTHER; note = 2'-O-methyl modified nucleoside
  modified_base 16: mod_base = OTHER; note = 2'-fluoro-modified nucleoside
  modified_base 17: mod_base = OTHER; note = 2'-O-methyl modified nucleoside
  modified_base 18: mod_base = OTHER; note = 2'-fluoro-modified nucleoside
  modified_base 19: mod_base = OTHER; note = 2'-O-methyl modified nucleoside with phosphorothioate linkage
  modified_base 20: mod_base = OTHER; note = 2'-O-methyl modified nucleoside with phosphorothioate linkage
  modified_base 21: mod_base = OTHER; note = 2'-O-methyl modified nucleoside
tggatctatgaactggtagtt

SEQ ID NO: 12982 - RNA, 21 nt, synthetic construct
  source 1..21: mol_type = other RNA
  modified_base 1: mod_base = OTHER; note = 2'-O-methyl modified nucleoside with phosphorothioate linkage
  modified_base 2: mod_base = OTHER; note = 2'-fluoro-modified nucleoside with phosphorothioate linkage
  modified_base 3: mod_base = OTHER; note = 2'-O-methyl modified nucleoside
  modified_base 4: mod_base = OTHER; note = 2'-fluoro-modified nucleoside
  modified_base 5: mod_base = OTHER; note = 2'-O-methyl modified nucleoside
  modified_base 6: mod_base = OTHER; note = 2'-fluoro-modified nucleoside
  modified_base 7: mod_base = OTHER; note = 2'-O-methyl modified nucleoside
  modified_base 8: mod_base = OTHER; note = 2'-fluoro-modified nucleoside
  modified_base 9: mod_base = OTHER; note = 2'-O-methyl modified nucleoside
  modified_base 10: mod_base = OTHER; note = 2'-fluoro-modified nucleoside
  modified_base 11: mod_base = OTHER; note = 2'-O-methyl modified nucleoside
  modified_base 12: mod_base = OTHER; note = 2'-fluoro-modified nucleoside
  modified_base 13: mod_base = OTHER; note = 2'-O-methyl modified nucleoside
  modified_base 14: mod_base = OTHER; note = 2'-fluoro-modified nucleoside
  modified_base 15: mod_base = OTHER; note = 2'-O-methyl modified nucleoside
  modified_base 16: mod_base = OTHER; note = 2'-fluoro-modified nucleoside
  modified_base 17: mod_base = OTHER; note = 2'-O-methyl modified nucleoside
  modified_base 18: mod_base = OTHER; note = 2'-fluoro-modified nucleoside
  modified_base 19: mod_base = OTHER; note = 2'-O-methyl modified nucleoside with phosphorothioate linkage
  modified_base 20: mod_base = OTHER; note = 2'-O-methyl modified nucleoside with phosphorothioate linkage
  modified_base 21: mod_base = OTHER; note = 2'-O-methyl modified nucleoside
tccaagcttatggatcaagtt

SEQ ID NO: 12983 - RNA, 21 nt, synthetic construct
  source 1..21: mol_type = other RNA
  modified_base 1: mod_base = OTHER; note = 2'-O-methyl modified nucleoside with phosphorothioate linkage
  modified_base 2: mod_base = OTHER; note = 2'-fluoro-modified nucleoside with phosphorothioate linkage
  modified_base 3: mod_base = OTHER; note = 2'-O-methyl modified nucleoside
  modified_base 4: mod_base = OTHER; note = 2'-fluoro-modified nucleoside
  modified_base 5: mod_base = OTHER; note = 2'-O-methyl modified nucleoside
  modified_base 6: mod_base = OTHER; note = 2'-fluoro-modified nucleoside
  modified_base 7: mod_base = OTHER; note = 2'-O-methyl modified nucleoside
  modified_base 8: mod_base = OTHER; note = 2'-fluoro-modified nucleoside
  modified_base 9: mod_base = OTHER; note = 2'-O-methyl modified nucleoside
  modified_base 10: mod_base = OTHER; note = 2'-fluoro-modified nucleoside
  modified_base 11: mod_base = OTHER; note = 2'-O-methyl modified nucleoside
  modified_base 12: mod_base = OTHER; note = 2'-fluoro-modified nucleoside
  modified_base 13: mod_base = OTHER; note = 2'-O-methyl modified nucleoside
  modified_base 14: mod_base = OTHER; note = 2'-fluoro-modified nucleoside
  modified_base 15: mod_base = OTHER; note = 2'-O-methyl modified nucleoside
  modified_base 16: mod_base = OTHER; note = 2'-fluoro-modified nucleoside
  modified_base 17: mod_base = OTHER; note = 2'-O-methyl modified nucleoside
  modified_base 18: mod_base = OTHER; note = 2'-fluoro-modified nucleoside
  modified_base 19: mod_base = OTHER; note = 2'-O-methyl modified nucleoside with phosphorothioate linkage
  modified_base 20: mod_base = OTHER; note = 2'-O-methyl modified nucleoside with phosphorothioate linkage
  modified_base 21: mod_base = OTHER; note = 2'-O-methyl modified nucleoside
ttagagaacatctttccgttt

SEQ ID NO: 12984 - RNA, 21 nt, synthetic construct
  source 1..21: mol_type = other RNA
  modified_base 1: mod_base = OTHER; note = 2'-O-methyl modified nucleoside with phosphorothioate linkage
  modified_base 2: mod_base = OTHER; note = 2'-fluoro-modified nucleoside with phosphorothioate linkage
  modified_base 3: mod_base = OTHER; note = 2'-O-methyl modified nucleoside
  modified_base 4: mod_base = OTHER; note = 2'-fluoro-modified nucleoside
  modified_base 5: mod_base = OTHER; note = 2'-O-methyl modified nucleoside
  modified_base 6: mod_base = OTHER; note = 2'-fluoro-modified nucleoside
  modified_base 7: mod_base = OTHER; note = 2'-O-methyl modified nucleoside
  modified_base 8: mod_base = OTHER; note = 2'-fluoro-modified nucleoside
  modified_base 9: mod_base = OTHER; note = 2'-O-methyl modified nucleoside
  modified_base 10: mod_base = OTHER; note = 2'-fluoro-modified nucleoside
  modified_base 11: mod_base = OTHER; note = 2'-O-methyl modified nucleoside
  modified_base 12: mod_base = OTHER; note = 2'-fluoro-modified nucleoside
  modified_base 13: mod_base = OTHER; note = 2'-O-methyl modified nucleoside
  modified_base 14: mod_base = OTHER; note = 2'-fluoro-modified nucleoside
  modified_base 15: mod_base = OTHER; note = 2'-O-methyl modified nucleoside
  modified_base 16: mod_base = OTHER; note = 2'-fluoro-modified nucleoside
  modified_base 17: mod_base = OTHER; note = 2'-O-methyl modified nucleoside
  modified_base 18: mod_base = OTHER; note = 2'-fluoro-modified nucleoside
  modified_base 19: mod_base = OTHER; note = 2'-O-methyl modified nucleoside with phosphorothioate linkage
  modified_base 20: mod_base = OTHER; note = 2'-O-methyl modified nucleoside with phosphorothioate linkage
  modified_base 21: mod_base = OTHER; note = 2'-O-methyl modified nucleoside
tcaactatatgcccatggatt

SEQ ID NO: 12985 - RNA, 21 nt, synthetic construct
  source 1..21: mol_type = other RNA
  modified_base 1: mod_base = OTHER; note = 2'-O-methyl modified nucleoside with phosphorothioate linkage
  modified_base 2: mod_base = OTHER; note = 2'-fluoro-modified nucleoside with phosphorothioate linkage
  modified_base 3: mod_base = OTHER; note = 2'-O-methyl modified nucleoside
  modified_base 4: mod_base = OTHER; note = 2'-fluoro-modified nucleoside
  modified_base 5: mod_base = OTHER; note = 2'-O-methyl modified nucleoside
  modified_base 6: mod_base = OTHER; note = 2'-fluoro-modified nucleoside
  modified_base 7: mod_base = OTHER; note = 2'-O-methyl modified nucleoside
  modified_base 8: mod_base = OTHER; note = 2'-fluoro-modified nucleoside
  modified_base 9: mod_base = OTHER; note = 2'-O-methyl modified nucleoside
  modified_base 10: mod_base = OTHER; note = 2'-fluoro-modified nucleoside
  modified_base 11: mod_base = OTHER; note = 2'-O-methyl modified nucleoside
  modified_base 12: mod_base = OTHER; note = 2'-fluoro-modified nucleoside
  modified_base 13: mod_base = OTHER; note = 2'-O-methyl modified nucleoside
  modified_base 14: mod_base = OTHER; note = 2'-fluoro-modified nucleoside
  modified_base 15: mod_base = OTHER; note = 2'-O-methyl modified nucleoside
  modified_base 16: mod_base = OTHER; note = 2'-fluoro-modified nucleoside
  modified_base 17: mod_base = OTHER; note = 2'-O-methyl modified nucleoside
  modified_base 18: mod_base = OTHER; note = 2'-fluoro-modified nucleoside
  modified_base 19: mod_base = OTHER; note = 2'-O-methyl modified nucleoside with phosphorothioate linkage
  modified_base 20: mod_base = OTHER; note = 2'-O-methyl modified nucleoside with phosphorothioate linkage
  modified_base 21: mod_base = OTHER; note = 2'-O-methyl modified nucleoside
tcgaagtaattcaactatatt

SEQ ID NO: 12986 - RNA, 21 nt, synthetic construct
  source 1..21: mol_type = other RNA
  modified_base 1: mod_base = OTHER; note = 2'-O-methyl modified nucleoside with phosphorothioate linkage
  modified_base 2: mod_base = OTHER; note = 2'-fluoro-modified nucleoside with phosphorothioate linkage
  modified_base 3: mod_base = OTHER; note = 2'-O-methyl modified nucleoside
  modified_base 4: mod_base = OTHER; note = 2'-fluoro-modified nucleoside
  modified_base 5: mod_base = OTHER; note = 2'-O-methyl modified nucleoside
  modified_base 6: mod_base = OTHER; note = 2'-fluoro-modified nucleoside
  modified_base 7: mod_base = OTHER; note = 2'-O-methyl modified nucleoside
  modified_base 8: mod_base = OTHER; note = 2'-fluoro-modified nucleoside
  modified_base 9: mod_base = OTHER; note = 2'-O-methyl modified nucleoside
  modified_base 10: mod_base = OTHER; note = 2'-fluoro-modified nucleoside
  modified_base 11: mod_base = OTHER; note = 2'-O-methyl modified nucleoside
  modified_base 12: mod_base = OTHER; note = 2'-fluoro-modified nucleoside
  modified_base 13: mod_base = OTHER; note = 2'-O-methyl modified nucleoside
  modified_base 14: mod_base = OTHER; note = 2'-fluoro-modified nucleoside
  modified_base 15: mod_base = OTHER; note = 2'-O-methyl modified nucleoside
  modified_base 16: mod_base = OTHER; note = 2'-fluoro-modified nucleoside
  modified_base 17: mod_base = OTHER; note = 2'-O-methyl modified nucleoside
  modified_base 18: mod_base = OTHER; note = 2'-fluoro-modified nucleoside
  modified_base 19: mod_base = OTHER; note = 2'-O-methyl modified nucleoside with phosphorothioate linkage
  modified_base 20: mod_base = OTHER; note = 2'-O-methyl modified nucleoside with phosphorothioate linkage
  modified_base 21: mod_base = OTHER; note = 2'-O-methyl modified nucleoside
ttcgaagtaattcaactattt

SEQ ID NO: 12987 - RNA, 21 nt, synthetic construct
  source 1..21: mol_type = other RNA
  modified_base 1: mod_base = OTHER; note = 2'-O-methyl modified nucleoside with phosphorothioate linkage
  modified_base 2: mod_base = OTHER; note = 2'-fluoro-modified nucleoside with phosphorothioate linkage
  modified_base 3: mod_base = OTHER; note = 2'-O-methyl modified nucleoside
  modified_base 4: mod_base = OTHER; note = 2'-fluoro-modified nucleoside
  modified_base 5: mod_base = OTHER; note = 2'-O-methyl modified nucleoside
  modified_base 6: mod_base = OTHER; note = 2'-fluoro-modified nucleoside
  modified_base 7: mod_base = OTHER; note = 2'-O-methyl modified nucleoside
  modified_base 8: mod_base = OTHER; note = 2'-fluoro-modified nucleoside
  modified_base 9: mod_base = OTHER; note = 2'-O-methyl modified nucleoside
  modified_base 10: mod_base = OTHER; note = 2'-fluoro-modified nucleoside
  modified_base 11: mod_base = OTHER; note = 2'-O-methyl modified nucleoside
  modified_base 12: mod_base = OTHER; note = 2'-fluoro-modified nucleoside
  modified_base 13: mod_base = OTHER; note = 2'-O-methyl modified nucleoside
  modified_base 14: mod_base = OTHER; note = 2'-fluoro-modified nucleoside
  modified_base 15: mod_base = OTHER; note = 2'-O-methyl modified nucleoside
  modified_base 16: mod_base = OTHER; note = 2'-fluoro-modified nucleoside
  modified_base 17: mod_base = OTHER; note = 2'-O-methyl modified nucleoside
  modified_base 18: mod_base = OTHER; note = 2'-fluoro-modified nucleoside
  modified_base 19: mod_base = OTHER; note = 2'-O-methyl modified nucleoside with phosphorothioate linkage
  modified_base 20: mod_base = OTHER; note = 2'-O-methyl modified nucleoside with phosphorothioate linkage
  modified_base 21: mod_base = OTHER; note = 2'-O-methyl modified nucleoside
ttgtcgaagtaattcaacttt

SEQ ID NO: 12988 - RNA, 21 nt, synthetic construct
  source 1..21: mol_type = other RNA
  modified_base 1: mod_base = OTHER; note = 2'-O-methyl modified nucleoside with phosphorothioate linkage
  modified_base 2: mod_base = OTHER; note = 2'-fluoro-modified nucleoside with phosphorothioate linkage
  modified_base 3: mod_base = OTHER; note = 2'-O-methyl modified nucleoside
  modified_base 4: mod_base = OTHER; note = 2'-fluoro-modified nucleoside
  modified_base 5: mod_base = OTHER; note = 2'-O-methyl modified nucleoside
  modified_base 6: mod_base = OTHER; note = 2'-fluoro-modified nucleoside
  modified_base 7: mod_base = OTHER; note = 2'-O-methyl modified nucleoside
  modified_base 8: mod_base = OTHER; note = 2'-fluoro-modified nucleoside
  modified_base 9: mod_base = OTHER; note = 2'-O-methyl modified nucleoside
  modified_base 10: mod_base = OTHER; note = 2'-fluoro-modified nucleoside
  modified_base 11: mod_base = OTHER; note = 2'-O-methyl modified nucleoside
  modified_base 12: mod_base = OTHER; note = 2'-fluoro-modified nucleoside
  modified_base 13: mod_base = OTHER; note = 2'-O-methyl modified nucleoside
  modified_base 14: mod_base = OTHER; note = 2'-fluoro-modified nucleoside
  modified_base 15: mod_base = OTHER; note = 2'-O-methyl modified nucleoside
  modified_base 16: mod_base = OTHER; note = 2'-fluoro-modified nucleoside
  modified_base 17: mod_base = OTHER; note = 2'-O-methyl modified nucleoside
  modified_base 18: mod_base = OTHER; note = 2'-fluoro-modified nucleoside
  modified_base 19: mod_base = OTHER; note = 2'-O-methyl modified nucleoside with phosphorothioate linkage
  modified_base 20: mod_base = OTHER; note = 2'-O-methyl modified nucleoside with phosphorothioate linkage
  modified_base 21: mod_base = OTHER; note = 2'-O-methyl modified nucleoside
tagaattgctgctgtcgaatt

SEQ ID NO: 12989 - RNA, 21 nt, synthetic construct
  source 1..21: mol_type = other RNA
  modified_base 1: mod_base = OTHER; note = 2'-O-methyl modified nucleoside with phosphorothioate linkage
  modified_base 2: mod_base = OTHER; note = 2'-fluoro-modified nucleoside with phosphorothioate linkage
  modified_base 3: mod_base = OTHER; note = 2'-O-methyl modified nucleoside
  modified_base 4: mod_base = OTHER; note = 2'-fluoro-modified nucleoside
  modified_base 5: mod_base = OTHER; note = 2'-O-methyl modified nucleoside
  modified_base 6: mod_base = OTHER; note = 2'-fluoro-modified nucleoside
  modified_base 7: mod_base = OTHER; note = 2'-O-methyl modified nucleoside
  modified_base 8: mod_base = OTHER; note = 2'-fluoro-modified nucleoside
  modified_base 9: mod_base = OTHER; note = 2'-O-methyl modified nucleoside
  modified_base 10: mod_base = OTHER; note = 2'-fluoro-modified nucleoside
  modified_base 11: mod_base = OTHER; note = 2'-O-methyl modified nucleoside
  modified_base 12: mod_base = OTHER; note = 2'-fluoro-modified nucleoside
  modified_base 13: mod_base = OTHER; note = 2'-O-methyl modified nucleoside
  modified_base 14: mod_base = OTHER; note = 2'-fluoro-modified nucleoside
  modified_base 15: mod_base = OTHER; note = 2'-O-methyl modified nucleoside
  modified_base 16: mod_base = OTHER; note = 2'-fluoro-modified nucleoside
  modified_base 17: mod_base = OTHER; note = 2'-O-methyl modified nucleoside
  modified_base 18: mod_base = OTHER; note = 2'-fluoro-modified nucleoside
  modified_base 19: mod_base = OTHER; note = 2'-O-methyl modified nucleoside with phosphorothioate linkage
  modified_base 20: mod_base = OTHER; note = 2'-O-methyl modified nucleoside with phosphorothioate linkage
  modified_base 21: mod_base = OTHER; note = 2'-O-methyl modified nucleoside
tagagtatctaccacaacttt

SEQ ID NO: 12990 - RNA, 21 nt, synthetic construct
  source 1..21: mol_type = other RNA
  modified_base 1: mod_base = OTHER; note = 2'-O-methyl modified nucleoside with phosphorothioate linkage
  modified_base 2: mod_base = OTHER; note = 2'-fluoro-modified nucleoside with phosphorothioate linkage
  modified_base 3: mod_base = OTHER; note = 2'-O-methyl modified nucleoside
  modified_base 4: mod_base = OTHER; note = 2'-fluoro-modified nucleoside
  modified_base 5: mod_base = OTHER; note = 2'-O-methyl modified nucleoside
  modified_base 6: mod_base = OTHER; note = 2'-fluoro-modified nucleoside
  modified_base 7: mod_base = OTHER; note = 2'-O-methyl modified nucleoside
  modified_base 8: mod_base = OTHER; note = 2'-fluoro-modified nucleoside
  modified_base 9: mod_base = OTHER; note = 2'-O-methyl modified nucleoside
  modified_base 10: mod_base = OTHER; note = 2'-fluoro-modified nucleoside
  modified_base 11: mod_base = OTHER; note = 2'-O-methyl modified nucleoside
  modified_base 12: mod_base = OTHER; note = 2'-fluoro-modified nucleoside
  modified_base 13: mod_base = OTHER; note = 2'-O-methyl modified nucleoside
  modified_base 14: mod_base = OTHER; note = 2'-fluoro-modified nucleoside
  modified_base 15: mod_base = OTHER; note = 2'-O-methyl modified nucleoside
  modified_base 16: mod_base = OTHER; note = 2'-fluoro-modified nucleoside
  modified_base 17: mod_base = OTHER; note = 2'-O-methyl modified nucleoside
  modified_base 18: mod_base = OTHER; note = 2'-fluoro-modified nucleoside
  modified_base 19: mod_base = OTHER; note = 2'-O-methyl modified nucleoside with phosphorothioate linkage
  modified_base 20: mod_base = OTHER; note = 2'-O-methyl modified nucleoside with phosphorothioate linkage
  modified_base 21: mod_base = OTHER; note = 2'-O-methyl modified nucleoside
tcgatcataggagattccatt

SEQ ID NO: 12991 - RNA, 21 nt, synthetic construct
  source 1..21: mol_type = other RNA
  modified_base 1: mod_base = OTHER; note = 2'-O-methyl modified nucleoside with phosphorothioate linkage
  modified_base 2: mod_base = OTHER; note = 2'-fluoro-modified nucleoside with phosphorothioate linkage
  modified_base 3: mod_base = OTHER; note = 2'-O-methyl modified nucleoside
  modified_base 4: mod_base = OTHER; note = 2'-fluoro-modified nucleoside
  modified_base 5: mod_base = OTHER; note = 2'-O-methyl modified nucleoside
  modified_base 6: mod_base = OTHER; note = 2'-fluoro-modified nucleoside
  modified_base 7: mod_base = OTHER; note = 2'-O-methyl modified nucleoside
  modified_base 8: mod_base = OTHER; note = 2'-fluoro-modified nucleoside
  modified_base 9: mod_base = OTHER; note = 2'-O-methyl modified nucleoside
  modified_base 10: mod_base = OTHER; note = 2'-fluoro-modified nucleoside
  modified_base 11: mod_base = OTHER; note = 2'-O-methyl modified nucleoside
  modified_base 12: mod_base = OTHER; note = 2'-fluoro-modified nucleoside
  modified_base 13: mod_base = OTHER; note = 2'-O-methyl modified nucleoside
  modified_base 14: mod_base = OTHER; note = 2'-fluoro-modified nucleoside
  modified_base 15: mod_base = OTHER; note = 2'-O-methyl modified nucleoside
  modified_base 16: mod_base = OTHER; note = 2'-fluoro-modified nucleoside
  modified_base 17: mod_base = OTHER; note = 2'-O-methyl modified nucleoside
  modified_base 18: mod_base = OTHER; note = 2'-fluoro-modified nucleoside
  modified_base 19: mod_base = OTHER; note = 2'-O-methyl modified nucleoside with phosphorothioate linkage
  modified_base 20: mod_base = OTHER; note = 2'-O-methyl modified nucleoside with phosphorothioate linkage
  modified_base 21: mod_base = OTHER; note = 2'-O-methyl modified nucleoside
tcattgtagtgaccttcgatt

SEQ ID NO: 12992 - RNA, 21 nt, synthetic construct
  source 1..21: mol_type = other RNA
  modified_base 1: mod_base = OTHER; note = 2'-O-methyl modified nucleoside with phosphorothioate linkage
  modified_base 2: mod_base = OTHER; note = 2'-fluoro-modified nucleoside with phosphorothioate linkage
  modified_base 3: mod_base = OTHER; note = 2'-O-methyl modified nucleoside
  modified_base 4: mod_base = OTHER; note = 2'-fluoro-modified nucleoside
  modified_base 5: mod_base = OTHER; note = 2'-O-methyl modified nucleoside
  modified_base 6: mod_base = OTHER; note = 2'-fluoro-modified nucleoside
  modified_base 7: mod_base = OTHER; note = 2'-O-methyl modified nucleoside
  modified_base 8: mod_base = OTHER; note = 2'-fluoro-modified nucleoside
  modified_base 9: mod_base = OTHER; note = 2'-O-methyl modified nucleoside
  modified_base 10: mod_base = OTHER; note = 2'-fluoro-modified nucleoside
  modified_base 11: mod_base = OTHER; note = 2'-O-methyl modified nucleoside
  modified_base 12: mod_base = OTHER; note = 2'-fluoro-modified nucleoside
  modified_base 13: mod_base = OTHER; note = 2'-O-methyl modified nucleoside
  modified_base 14: mod_base = OTHER; note = 2'-fluoro-modified nucleoside
  modified_base 15: mod_base = OTHER; note = 2'-O-methyl modified nucleoside
  modified_base 16: mod_base = OTHER; note = 2'-fluoro-modified nucleoside
  modified_base 17: mod_base = OTHER; note = 2'-O-methyl modified nucleoside
  modified_base 18: mod_base = OTHER; note = 2'-fluoro-modified nucleoside
  modified_base 19: mod_base = OTHER; note = 2'-O-methyl modified nucleoside with phosphorothioate linkage
  modified_base 20: mod_base = OTHER; note = 2'-O-methyl modified nucleoside with phosphorothioate linkage
  modified_base 21: mod_base = OTHER; note = 2'-O-methyl modified nucleoside
tcgtaacattctaataacatt

SEQ ID NO: 12993 - RNA, 21 nt, synthetic construct
  source 1..21: mol_type = other RNA
  modified_base 1: mod_base = OTHER; note = 2'-O-methyl modified nucleoside with phosphorothioate linkage
  modified_base 2: mod_base = OTHER; note = 2'-fluoro-modified nucleoside with phosphorothioate linkage
  modified_base 3: mod_base = OTHER; note = 2'-O-methyl modified nucleoside
  modified_base 4: mod_base = OTHER; note = 2'-fluoro-modified nucleoside
  modified_base 5: mod_base = OTHER; note = 2'-O-methyl modified nucleoside
  modified_base 6: mod_base = OTHER; note = 2'-fluoro-modified nucleoside
  modified_base 7: mod_base = OTHER; note = 2'-O-methyl modified nucleoside
  modified_base 8: mod_base = OTHER; note = 2'-fluoro-modified nucleoside
  modified_base 9: mod_base = OTHER; note = 2'-O-methyl modified nucleoside
  modified_base 10: mod_base = OTHER; note = 2'-fluoro-modified nucleoside
  modified_base 11: mod_base = OTHER; note = 2'-O-methyl modified nucleoside
  modified_base 12: mod_base = OTHER; note = 2'-fluoro-modified nucleoside
  modified_base 13: mod_base = OTHER; note = 2'-O-methyl modified nucleoside
  modified_base 14: mod_base = OTHER; note = 2'-fluoro-modified nucleoside
  modified_base 15: mod_base = OTHER; note = 2'-O-methyl modified nucleoside
  modified_base 16: mod_base = OTHER; note = 2'-fluoro-modified nucleoside
  modified_base 17: mod_base = OTHER; note = 2'-O-methyl modified nucleoside
  modified_base 18: mod_base = OTHER; note = 2'-fluoro-modified nucleoside
  modified_base 19: mod_base = OTHER; note = 2'-O-methyl modified nucleoside with phosphorothioate linkage
  modified_base 20: mod_base = OTHER; note = 2'-O-methyl modified nucleoside with phosphorothioate linkage
  modified_base 21: mod_base = OTHER; note = 2'-O-methyl modified nucleoside
tcggacacaaccatagttttt

SEQ ID NO: 12994 - RNA, 21 nt, synthetic construct
  source 1..21: mol_type = other RNA
  modified_base 1: mod_base = OTHER; note = 2'-O-methyl modified nucleoside with phosphorothioate linkage
  modified_base 2: mod_base = OTHER; note = 2'-fluoro-modified nucleoside with phosphorothioate linkage
  modified_base 3: mod_base = OTHER; note = 2'-O-methyl modified nucleoside
  modified_base 4: mod_base = OTHER; note = 2'-fluoro-modified nucleoside
  modified_base 5: mod_base = OTHER; note = 2'-O-methyl modified nucleoside
  modified_base 6: mod_base = OTHER; note = 2'-fluoro-modified nucleoside
  modified_base 7: mod_base = OTHER; note = 2'-O-methyl modified nucleoside
  modified_base 8: mod_base = OTHER; note = 2'-fluoro-modified nucleoside
  modified_base 9: mod_base = OTHER; note = 2'-O-methyl modified nucleoside
  modified_base 10: mod_base = OTHER; note = 2'-fluoro-modified nucleoside
  modified_base 11: mod_base = OTHER; note = 2'-O-methyl modified nucleoside
  modified_base 12: mod_base = OTHER; note = 2'-fluoro-modified nucleoside
  modified_base 13: mod_base = OTHER; note = 2'-O-methyl modified nucleoside
  modified_base 14: mod_base = OTHER; note = 2'-fluoro-modified nucleoside
  modified_base 15: mod_base = OTHER; note = 2'-O-methyl modified nucleoside
  modified_base 16: mod_base = OTHER; note = 2'-fluoro-modified nucleoside
  modified_base 17: mod_base = OTHER; note = 2'-O-methyl modified nucleoside
  modified_base 18: mod_base = OTHER; note = 2'-fluoro-modified nucleoside
  modified_base 19: mod_base = OTHER; note = 2'-O-methyl modified nucleoside with phosphorothioate linkage
  modified_base 20: mod_base = OTHER; note = 2'-O-methyl modified nucleoside with phosphorothioate linkage
  modified_base 21: mod_base = OTHER; note = 2'-O-methyl modified nucleoside
ttagctggtaacaacgctttt

SEQ ID NO: 12995 - RNA, 21 nt, synthetic construct
  source 1..21: mol_type = other RNA
  modified_base 1: mod_base = OTHER; note = 2'-O-methyl modified nucleoside with phosphorothioate linkage
  modified_base 2: mod_base = OTHER; note = 2'-fluoro-modified nucleoside with phosphorothioate linkage
  modified_base 3: mod_base = OTHER; note = 2'-O-methyl modified nucleoside
  modified_base 4: mod_base = OTHER; note = 2'-fluoro-modified nucleoside
  modified_base 5: mod_base = OTHER; note = 2'-O-methyl modified nucleoside
  modified_base 6: mod_base = OTHER; note = 2'-fluoro-modified nucleoside
  modified_base 7: mod_base = OTHER; note = 2'-O-methyl modified nucleoside
  modified_base 8: mod_base = OTHER; note = 2'-fluoro-modified nucleoside
  modified_base 9: mod_base = OTHER; note = 2'-O-methyl modified nucleoside
  modified_base 10: mod_base = OTHER; note = 2'-fluoro-modified nucleoside
  modified_base 11: mod_base = OTHER; note = 2'-O-methyl modified nucleoside
  modified_base 12: mod_base = OTHER; note = 2'-fluoro-modified nucleoside
  modified_base 13: mod_base = OTHER; note = 2'-O-methyl modified nucleoside
  modified_base 14: mod_base = OTHER; note = 2'-fluoro-modified nucleoside
  modified_base 15: mod_base = OTHER; note = 2'-O-methyl modified nucleoside
  modified_base 16: mod_base = OTHER; note = 2'-fluoro-modified nucleoside
  modified_base 17: mod_base = OTHER; note = 2'-O-methyl modified nucleoside
  modified_base 18: mod_base = OTHER; note = 2'-fluoro-modified nucleoside
  modified_base 19: mod_base = OTHER; note = 2'-O-methyl modified nucleoside with phosphorothioate linkage
  modified_base 20: mod_base = OTHER; note = 2'-O-methyl modified nucleoside with phosphorothioate linkage
  modified_base 21: mod_base = OTHER; note = 2'-O-methyl modified nucleoside
tacttgctagcagtgaatatt

SEQ ID NO: 12996 - RNA, 21 nt, synthetic construct
  source 1..21: mol_type = other RNA
  modified_base 1: mod_base = OTHER; note = 2'-O-methyl modified nucleoside with phosphorothioate linkage
  modified_base 2: mod_base = OTHER; note = 2'-fluoro-modified nucleoside with phosphorothioate linkage
  modified_base 3: mod_base = OTHER; note = 2'-O-methyl modified nucleoside
  modified_base 4: mod_base = OTHER; note = 2'-fluoro-modified nucleoside
  modified_base 5: mod_base = OTHER; note = 2'-O-methyl modified nucleoside
  modified_base 6: mod_base = OTHER; note = 2'-fluoro-modified nucleoside
  modified_base 7: mod_base = OTHER; note = 2'-O-methyl modified nucleoside
  modified_base 8: mod_base = OTHER; note = 2'-fluoro-modified nucleoside
  modified_base 9: mod_base = OTHER; note = 2'-O-methyl modified nucleoside
  modified_base 10: mod_base = OTHER; note = 2'-fluoro-modified nucleoside
  modified_base 11: mod_base = OTHER; note = 2'-O-methyl modified nucleoside
  modified_base 12: mod_base = OTHER; note = 2'-fluoro-modified nucleoside
  modified_base 13: mod_base = OTHER; note = 2'-O-methyl modified nucleoside
  modified_base 14: mod_base = OTHER; note = 2'-fluoro-modified nucleoside
  modified_base 15: mod_base = OTHER; note = 2'-O-methyl modified nucleoside
  modified_base 16: mod_base = OTHER; note = 2'-fluoro-modified nucleoside
  modified_base 17: mod_base = OTHER; note = 2'-O-methyl modified nucleoside
  modified_base 18: mod_base = OTHER; note = 2'-fluoro-modified nucleoside
  modified_base 19: mod_base = OTHER; note = 2'-O-methyl modified nucleoside with phosphorothioate linkage
  modified_base 20: mod_base = OTHER; note = 2'-O-methyl modified nucleoside with phosphorothioate linkage
  modified_base 21: mod_base = OTHER; note = 2'-O-methyl modified nucleoside
tgacttgctagcagtgaattt

SEQ ID NO: 12997 - RNA, 21 nt, synthetic construct
  source 1..21: mol_type = other RNA
  modified_base 1: mod_base = OTHER; note = 2'-O-methyl modified nucleoside with phosphorothioate linkage
  modified_base 2: mod_base = OTHER; note = 2'-fluoro-modified nucleoside with phosphorothioate linkage
  modified_base 3: mod_base = OTHER; note = 2'-O-methyl modified nucleoside
  modified_base 4: mod_base = OTHER; note = 2'-fluoro-modified nucleoside
  modified_base 5: mod_base = OTHER; note = 2'-O-methyl modified nucleoside
  modified_base 6: mod_base = OTHER; note = 2'-fluoro-modified nucleoside
  modified_base 7: mod_base = OTHER; note = 2'-O-methyl modified nucleoside
  modified_base 8: mod_base = OTHER; note = 2'-fluoro-modified nucleoside
  modified_base 9: mod_base = OTHER; note = 2'-O-methyl modified nucleoside
  modified_base 10: mod_base = OTHER; note = 2'-fluoro-modified nucleoside
  modified_base 11: mod_base = OTHER; note = 2'-O-methyl modified nucleoside
  modified_base 12: mod_base = OTHER; note = 2'-fluoro-modified nucleoside
  modified_base 13: mod_base = OTHER; note = 2'-O-methyl modified nucleoside
  modified_base 14: mod_base = OTHER; note = 2'-fluoro-modified nucleoside
  modified_base 15: mod_base = OTHER; note = 2'-O-methyl modified nucleoside
  modified_base 16: mod_base = OTHER; note = 2'-fluoro-modified nucleoside
  modified_base 17: mod_base = OTHER; note = 2'-O-methyl modified nucleoside
  modified_base 18: mod_base = OTHER; note = 2'-fluoro-modified nucleoside
  modified_base 19: mod_base = OTHER; note = 2'-O-methyl modified nucleoside with phosphorothioate linkage
  modified_base 20: mod_base = OTHER; note = 2'-O-methyl modified nucleoside with phosphorothioate linkage
  modified_base 21: mod_base = OTHER; note = 2'-O-methyl modified nucleoside
tcaatgtgtgtggacataatt

SEQ ID NO: 12998 - RNA, 21 nt, synthetic construct
  source 1..21: mol_type = other RNA
  modified_base 1: mod_base = OTHER; note = 2'-O-methyl modified nucleoside with phosphorothioate linkage
  modified_base 2: mod_base = OTHER; note = 2'-fluoro-modified nucleoside with phosphorothioate linkage
  modified_base 3: mod_base = OTHER; note = 2'-O-methyl modified nucleoside
  modified_base 4: mod_base = OTHER; note = 2'-fluoro-modified nucleoside
  modified_base 5: mod_base = OTHER; note = 2'-O-methyl modified nucleoside
  modified_base 6: mod_base = OTHER; note = 2'-fluoro-modified nucleoside
  modified_base 7: mod_base = OTHER; note = 2'-O-methyl modified nucleoside
  modified_base 8: mod_base = OTHER; note = 2'-fluoro-modified nucleoside
  modified_base 9: mod_base = OTHER; note = 2'-O-methyl modified nucleoside
  modified_base 10: mod_base = OTHER; note = 2'-fluoro-modified nucleoside
  modified_base 11: mod_base = OTHER; note = 2'-O-methyl modified nucleoside
  modified_base 12: mod_base = OTHER; note = 2'-fluoro-modified nucleoside
  modified_base 13: mod_base = OTHER; note = 2'-O-methyl modified nucleoside
  modified_base 14: mod_base = OTHER; note = 2'-fluoro-modified nucleoside
  modified_base 15: mod_base = OTHER; note = 2'-O-methyl modified nucleoside
  modified_base 16: mod_base = OTHER; note = 2'-fluoro-modified nucleoside
  modified_base 17: mod_base = OTHER; note = 2'-O-methyl modified nucleoside
  modified_base 18: mod_base = OTHER; note = 2'-fluoro-modified nucleoside
  modified_base 19: mod_base = OTHER; note = 2'-O-methyl modified nucleoside with phosphorothioate linkage
  modified_base 20: mod_base = OTHER; note = 2'-O-methyl modified nucleoside with phosphorothioate linkage
  modified_base 21: mod_base = OTHER; note = 2'-O-methyl modified nucleoside
tgcaacatttctttctgtttt

SEQ ID NO: 12999 - RNA, 21 nt, synthetic construct
  source 1..21: mol_type = other RNA
  modified_base 1: mod_base = OTHER; note = 2'-O-methyl modified nucleoside with phosphorothioate linkage
  modified_base 2: mod_base = OTHER; note = 2'-fluoro-modified nucleoside with phosphorothioate linkage
  modified_base 3: mod_base = OTHER; note = 2'-O-methyl modified nucleoside
  modified_base 4: mod_base = OTHER; note = 2'-fluoro-modified nucleoside
  modified_base 5: mod_base = OTHER; note = 2'-O-methyl modified nucleoside
  modified_base 6: mod_base = OTHER; note = 2'-fluoro-modified nucleoside
  modified_base 7: mod_base = OTHER; note = 2'-O-methyl modified nucleoside
  modified_base 8: mod_base = OTHER; note = 2'-fluoro-modified nucleoside
  modified_base 9: mod_base = OTHER; note = 2'-O-methyl modified nucleoside
  modified_base 10: mod_base = OTHER; note = 2'-fluoro-modified nucleoside
  modified_base 11: mod_base = OTHER; note = 2'-O-methyl modified nucleoside
  modified_base 12: mod_base = OTHER; note = 2'-fluoro-modified nucleoside
  modified_base 13: mod_base = OTHER; note = 2'-O-methyl modified nucleoside
  modified_base 14: mod_base = OTHER; note = 2'-fluoro-modified nucleoside
  modified_base 15: mod_base = OTHER; note = 2'-O-methyl modified nucleoside
  modified_base 16: mod_base = OTHER; note = 2'-fluoro-modified nucleoside
  modified_base 17: mod_base = OTHER; note = 2'-O-methyl modified nucleoside
  modified_base 18: mod_base = OTHER; note = 2'-fluoro-modified nucleoside
  modified_base 19: mod_base = OTHER; note = 2'-O-methyl modified nucleoside with phosphorothioate linkage
  modified_base 20: mod_base = OTHER; note = 2'-O-methyl modified nucleoside with phosphorothioate linkage
  modified_base 21: mod_base = OTHER; note = 2'-O-methyl modified nucleoside
tacaaaactcagaatatattt

SEQ ID NO: 13000 - RNA, 21 nt, synthetic construct
  source 1..21: mol_type = other RNA
  modified_base 1: mod_base = OTHER; note = 2'-O-methyl modified nucleoside with phosphorothioate linkage
  modified_base 2: mod_base = OTHER; note = 2'-fluoro-modified nucleoside with phosphorothioate linkage
  modified_base 3: mod_base = OTHER; note = 2'-O-methyl modified nucleoside
  modified_base 4: mod_base = OTHER; note = 2'-fluoro-modified nucleoside
  modified_base 5: mod_base = OTHER; note = 2'-O-methyl modified nucleoside
  modified_base 6: mod_base = OTHER; note = 2'-fluoro-modified nucleoside
  modified_base 7: mod_base = OTHER; note = 2'-O-methyl modified nucleoside
  modified_base 8: mod_base = OTHER; note = 2'-fluoro-modified nucleoside
  modified_base 9: mod_base = OTHER; note = 2'-O-methyl modified nucleoside
  modified_base 10: mod_base = OTHER; note = 2'-fluoro-modified nucleoside
  modified_base 11: mod_base = OTHER; note = 2'-O-methyl modified nucleoside
  modified_base 12: mod_base = OTHER; note = 2'-fluoro-modified nucleoside
  modified_base 13: mod_base = OTHER; note = 2'-O-methyl modified nucleoside
  modified_base 14: mod_base = OTHER; note = 2'-fluoro-modified nucleoside
  modified_base 15: mod_base = OTHER; note = 2'-O-methyl modified nucleoside
  modified_base 16: mod_base = OTHER; note = 2'-fluoro-modified nucleoside
  modified_base 17: mod_base = OTHER; note = 2'-O-methyl modified nucleoside
  modified_base 18: mod_base = OTHER; note = 2'-fluoro-modified nucleoside
  modified_base 19: mod_base = OTHER; note = 2'-O-methyl modified nucleoside with phosphorothioate linkage
  modified_base 20: mod_base = OTHER; note = 2'-O-methyl modified nucleoside with phosphorothioate linkage
  modified_base 21: mod_base = OTHER; note = 2'-O-methyl modified nucleoside
tcggacacaaccatagttttt

SEQ ID NO: 13001 - RNA, 21 nt, synthetic construct
  source 1..21: mol_type = other RNA
  modified_base 1: mod_base = OTHER; note = 2'-O-methyl modified nucleoside with phosphorothioate linkage
  modified_base 2: mod_base = OTHER; note = 2'-fluoro-modified nucleoside with phosphorothioate linkage
  modified_base 3: mod_base = OTHER; note = 2'-O-methyl modified nucleoside
  modified_base 4: mod_base = OTHER; note = 2'-O-methyl modified nucleoside
  modified_base 5: mod_base = OTHER; note = 2'-O-methyl modified nucleoside
  modified_base 6: mod_base = OTHER; note = 2'-fluoro-modified nucleoside
  modified_base 7: mod_base = OTHER; note = 2'-O-methyl modified nucleoside
  modified_base 8: mod_base = OTHER; note = 2'-fluoro-modified nucleoside
  modified_base 9: mod_base = OTHER; note = 2'-O-methyl modified nucleoside
  modified_base 10: mod_base = OTHER; note = 2'-fluoro-modified nucleoside
  modified_base 11: mod_base = OTHER; note = 2'-O-methyl modified nucleoside
  modified_base 12: mod_base = OTHER; note = 2'-fluoro-modified nucleoside
  modified_base 13: mod_base = OTHER; note = 2'-O-methyl modified nucleoside
  modified_base 14: mod_base = OTHER; note = 2'-fluoro-modified nucleoside
  modified_base 15: mod_base = OTHER; note = 2'-O-methyl modified nucleoside
  modified_base 16: mod_base = OTHER; note = 2'-fluoro-modified nucleoside
  modified_base 17: mod_base = OTHER; note = 2'-O-methyl modified nucleoside
  modified_base 18: mod_base = OTHER; note = 2'-fluoro-modified nucleoside
  modified_base 19: mod_base = OTHER; note = 2'-O-methyl modified nucleoside with phosphorothioate linkage
  modified_base 20: mod_base = OTHER; note = 2'-O-methyl modified nucleoside with phosphorothioate linkage
  modified_base 21: mod_base = OTHER; note = 2'-O-methyl modified nucleoside
tcggacacaaccatagttttt

SEQ ID NO: 13002 - RNA, 21 nt, synthetic construct
  source 1..21: mol_type = other RNA
  modified_base 1: mod_base = OTHER; note = 2'-O-methyl modified nucleoside with phosphorothioate linkage
  modified_base 2: mod_base = OTHER; note = 2'-fluoro-modified nucleoside with phosphorothioate linkage
  modified_base 3: mod_base = OTHER; note = 2'-O-methyl modified nucleoside
  modified_base 4: mod_base = OTHER; note = 2'-fluoro-modified nucleoside
  modified_base 5: mod_base = OTHER; note = 2'-O-methyl modified nucleoside
  modified_base 6: mod_base = OTHER; note = 2'-fluoro-modified nucleoside
  modified_base 7: mod_base = OTHER; note = 2'-O-methyl modified nucleoside
  modified_base 8: mod_base = OTHER; note = 2'-fluoro-modified nucleoside
  modified_base 9: mod_base = OTHER; note = 2'-O-methyl modified nucleoside
  modified_base 10: mod_base = OTHER; note = 2'-fluoro-modified nucleoside
  modified_base 11: mod_base = OTHER; note = 2'-O-methyl modified nucleoside
  modified_base 12: mod_base = OTHER; note = 2'-O-methyl modified nucleoside
  modified_base 13: mod_base = OTHER; note = 2'-O-methyl modified nucleoside
  modified_base 14: mod_base = OTHER; note = 2'-fluoro-modified nucleoside
  modified_base 15: mod_base = OTHER; note = 2'-O-methyl modified nucleoside
  modified_base 16: mod_base = OTHER; note = 2'-fluoro-modified nucleoside
  modified_base 17: mod_base = OTHER; note = 2'-O-methyl modified nucleoside
  modified_base 18: mod_base = OTHER; note = 2'-fluoro-modified nucleoside
  modified_base 19: mod_base = OTHER; note = 2'-O-methyl modified nucleoside with phosphorothioate linkage
  modified_base 20: mod_base = OTHER; note = 2'-O-methyl modified nucleoside with phosphorothioate linkage
  modified_base 21: mod_base = OTHER; note = 2'-O-methyl modified nucleoside
tcggacacaaccatagttttt

SEQ ID NO: 13003 - RNA, 21 nt, synthetic construct
  source 1..21: mol_type = other RNA
  modified_base 1: mod_base = OTHER; note = 2'-O-methyl modified nucleoside with phosphorothioate linkage
  modified_base 2: mod_base = OTHER; note = 2'-fluoro-modified nucleoside with phosphorothioate linkage
  modified_base 3: mod_base = OTHER; note = 2'-O-methyl modified nucleoside
  modified_base 4: mod_base = OTHER; note = 2'-fluoro-modified nucleoside
  modified_base 5: mod_base = OTHER; note = 2'-O-methyl modified nucleoside
  modified_base 6: mod_base = OTHER; note = 2'-fluoro-modified nucleoside
  modified_base 7: mod_base = OTHER; note = 2'-O-methyl modified nucleoside
  modified_base 8: mod_base = OTHER; note = 2'-O-methyl modified nucleoside
  modified_base 9: mod_base = OTHER; note = 2'-fluoro-modified nucleoside
  modified_base 10: mod_base = OTHER; note = 2'-O-methyl modified nucleoside
  modified_base 11: mod_base = OTHER; note = 2'-O-methyl modified nucleoside
  modified_base 12: mod_base = OTHER; note = 2'-O-methyl modified nucleoside
  modified_base 13: mod_base = OTHER; note = 2'-O-methyl modified nucleoside
  modified_base 14: mod_base = OTHER; note = 2'-fluoro-modified nucleoside
  modified_base 15: mod_base = OTHER; note = 2'-O-methyl modified nucleoside
  modified_base 16: mod_base = OTHER; note = 2'-fluoro-modified nucleoside
  modified_base 17: mod_base = OTHER; note = 2'-O-methyl modified nucleoside
  modified_base 18: mod_base = OTHER; note = 2'-fluoro-modified nucleoside
  modified_base 19: mod_base = OTHER; note = 2'-O-methyl modified nucleoside with phosphorothioate linkage
  modified_base 20: mod_base = OTHER; note = 2'-O-methyl modified nucleoside with phosphorothioate linkage
  modified_base 21: mod_base = OTHER; note = 2'-O-methyl modified nucleoside
tcggacacaaccatagttttt

SEQ ID NO: 13004 - RNA, 21 nt, synthetic construct
  source 1..21: mol_type = other RNA
  modified_base 1: mod_base = OTHER; note = 2'-O-methyl modified nucleoside with phosphorothioate linkage
  modified_base 2: mod_base = OTHER; note = 2'-fluoro-modified nucleoside with phosphorothioate linkage
  modified_base 3: mod_base = OTHER; note = 2'-O-methyl modified nucleoside
  modified_base 4: mod_base = OTHER; note = 2'-fluoro-modified nucleoside
  modified_base 5: mod_base = OTHER; note = 2'-O-methyl modified nucleoside
  modified_base 6: mod_base = OTHER; note = 2'-fluoro-modified nucleoside
  modified_base 7: mod_base = OTHER; note = 2'-O-methyl modified nucleoside
  modified_base 8: mod_base = OTHER; note = 2'-O-methyl modified nucleoside
  modified_base 9: mod_base = OTHER; note = 2'-fluoro-modified nucleoside
  modified_base 10: mod_base = OTHER; note = 2'-O-methyl modified nucleoside
  modified_base 11: mod_base = OTHER; note = 2'-fluoro-modified nucleoside
  modified_base 12: mod_base = OTHER; note = 2'-O-methyl modified nucleoside
  modified_base 13: mod_base = OTHER; note = 2'-O-methyl modified nucleoside
  modified_base 14: mod_base = OTHER; note = 2'-fluoro-modified nucleoside
  modified_base 15: mod_base = OTHER; note = 2'-O-methyl modified nucleoside
  modified_base 16: mod_base = OTHER; note = 2'-fluoro-modified nucleoside
  modified_base 17: mod_base = OTHER; note = 2'-O-methyl modified nucleoside
  modified_base 18: mod_base = OTHER; note = 2'-fluoro-modified nucleoside
  modified_base 19: mod_base = OTHER; note = 2'-O-methyl modified nucleoside with phosphorothioate linkage
  modified_base 20: mod_base = OTHER; note = 2'-O-methyl modified nucleoside with phosphorothioate linkage
  modified_base 21: mod_base = OTHER; note = 2'-O-methyl modified nucleoside
tcggacacaaccatagttttt

SEQ ID NO: 13005 - RNA, 21 nt, synthetic construct
  source 1..21: mol_type = other RNA
  modified_base 1: mod_base = OTHER; note = 2'-O-methyl modified nucleoside with phosphorothioate linkage
  modified_base 2: mod_base = OTHER; note = 2'-fluoro-modified nucleoside with phosphorothioate linkage
  modified_base 3: mod_base = OTHER; note = 2'-O-methyl modified nucleoside
  modified_base 4: mod_base = OTHER; note = 2'-fluoro-modified nucleoside
  modified_base 5: mod_base = OTHER; note = 2'-O-methyl modified nucleoside
  modified_base 6: mod_base = OTHER; note = 2'-O-methyl modified nucleoside
  modified_base 7: mod_base = OTHER; note = 2'-fluoro-modified nucleoside
  modified_base 8: mod_base = OTHER; note = 2'-O-methyl modified nucleoside
  modified_base 9: mod_base = OTHER; note = 2'-fluoro-modified nucleoside
  modified_base 10: mod_base = OTHER; note = 2'-O-methyl modified nucleoside
  modified_base 11: mod_base = OTHER; note = 2'-fluoro-modified nucleoside
  modified_base 12: mod_base = OTHER; note = 2'-O-methyl modified nucleoside
  modified_base 13: mod_base = OTHER; note = 2'-O-methyl modified nucleoside
  modified_base 14: mod_base = OTHER; note = 2'-fluoro-modified nucleoside
  modified_base 15: mod_base = OTHER; note = 2'-O-methyl modified nucleoside
  modified_base 16: mod_base = OTHER; note = 2'-fluoro-modified nucleoside
  modified_base 17: mod_base = OTHER; note = 2'-O-methyl modified nucleoside
  modified_base 18: mod_base = OTHER; note = 2'-fluoro-modified nucleoside
  modified_base 19: mod_base = OTHER; note = 2'-O-methyl modified nucleoside with phosphorothioate linkage
  modified_base 20: mod_base = OTHER; note = 2'-O-methyl modified nucleoside with phosphorothioate linkage
  modified_base 21: mod_base = OTHER; note = 2'-O-methyl modified nucleoside
tcggacacaaccatagttttt

SEQ ID NO: 13006 - RNA, 21 nt, synthetic construct
  source 1..21: mol_type = other RNA
  modified_base 1: mod_base = OTHER; note = 2'-O-methyl modified nucleoside with phosphorothioate linkage
  modified_base 2: mod_base = OTHER; note = 2'-fluoro-modified nucleoside with phosphorothioate linkage
  modified_base 3: mod_base = OTHER; note = 2'-O-methyl modified nucleoside
  modified_base 4: mod_base = OTHER; note = 2'-O-methyl modified nucleoside
  modified_base 5: mod_base = OTHER; note = 2'-fluoro-modified nucleoside
  modified_base 6: mod_base = OTHER; note = 2'-O-methyl modified nucleoside
  modified_base 7: mod_base = OTHER; note = 2'-fluoro-modified nucleoside
  modified_base 8: mod_base = OTHER; note = 2'-O-methyl modified nucleoside
  modified_base 9: mod_base = OTHER; note = 2'-fluoro-modified nucleoside
  modified_base 10: mod_base = OTHER; note = 2'-O-methyl modified nucleoside
  modified_base 11: mod_base = OTHER; note = 2'-fluoro-modified nucleoside
  modified_base 12: mod_base = OTHER; note = 2'-O-methyl modified nucleoside
  modified_base 13: mod_base = OTHER; note = 2'-O-methyl modified nucleoside
  modified_base 14: mod_base = OTHER; note = 2'-fluoro-modified nucleoside
  modified_base 15: mod_base = OTHER; note = 2'-O-methyl modified nucleoside
  modified_base 16: mod_base = OTHER; note = 2'-fluoro-modified nucleoside
  modified_base 17: mod_base = OTHER; note = 2'-O-methyl modified nucleoside
  modified_base 18: mod_base = OTHER; note = 2'-fluoro-modified nucleoside
  modified_base 19: mod_base = OTHER; note = 2'-O-methyl modified nucleoside with phosphorothioate linkage
  modified_base 20: mod_base = OTHER; note = 2'-O-methyl modified nucleoside with phosphorothioate linkage
  modified_base 21: mod_base = OTHER; note = 2'-O-methyl modified nucleoside
tcggacacaaccatagttttt

SEQ ID NO: 13007 - RNA, 21 nt, synthetic construct
  source 1..21: mol_type = other RNA
  modified_base 1: mod_base = OTHER; note = 2'-O-methyl modified nucleoside with phosphorothioate linkage
  modified_base 2: mod_base = OTHER; note = 2'-fluoro-modified nucleoside with phosphorothioate linkage
  modified_base 3: mod_base = OTHER; note = 2'-O-methyl modified nucleoside
  modified_base 4: mod_base = OTHER; note = 2'-fluoro-modified nucleoside
  modified_base 5: mod_base = OTHER; note = 2'-O-methyl modified nucleoside
  modified_base 6: mod_base = OTHER; note = 2'-fluoro-modified nucleoside
  modified_base 7: mod_base = OTHER; note = 2'-O-methyl modified nucleoside
  modified_base 8: mod_base = OTHER; note = 2'-fluoro-modified nucleoside
  modified_base 9: mod_base = OTHER; note = 2'-O-methyl modified nucleoside
  modified_base 10: mod_base = OTHER; note = 2'-fluoro-modified nucleoside
  modified_base 11: mod_base = OTHER; note = 2'-O-methyl modified nucleoside
  modified_base 12: mod_base = OTHER; note = 2'-fluoro-modified nucleoside
  modified_base 13: mod_base = OTHER; note = 2'-O-methyl modified nucleoside
  modified_base 14: mod_base = OTHER; note = 2'-fluoro-modified nucleoside
  modified_base 15: mod_base = OTHER; note = 2'-O-methyl modified nucleoside
  modified_base 16: mod_base = OTHER; note = 2'-fluoro-modified nucleoside
  modified_base 17: mod_base = OTHER; note = 2'-O-methyl modified nucleoside
  modified_base 18: mod_base = OTHER; note = 2'-fluoro-modified nucleoside
  modified_base 19: mod_base = OTHER; note = 2'-O-methyl modified nucleoside with phosphorothioate linkage
  modified_base 20: mod_base = OTHER; note = 2'-O-methyl modified nucleoside with phosphorothioate linkage
  modified_base 21: mod_base = OTHER; note = 2'-O-methyl modified nucleoside
tcggacacaaccatagttttt

SEQ ID NO: 13008 - RNA, 21 nt, synthetic construct
  source 1..21: mol_type = other RNA
  modified_base 1: mod_base = OTHER; note = 2'-O-methyl modified nucleoside with phosphorothioate linkage
  modified_base 2: mod_base = OTHER; note = 2'-fluoro-modified nucleoside with phosphorothioate linkage
  modified_base 3: mod_base = OTHER; note = 2'-O-methyl modified nucleoside
  modified_base 4: mod_base = OTHER; note = 2'-fluoro-modified nucleoside
  modified_base 5: mod_base = OTHER; note = 2'-O-methyl modified nucleoside
  modified_base 6: mod_base = OTHER; note = 2'-fluoro-modified nucleoside
  modified_base 7: mod_base = OTHER; note = 2'-O-methyl modified nucleoside
  modified_base 8: mod_base = OTHER; note = 2'-fluoro-modified nucleoside
  modified_base 9: mod_base = OTHER; note = 2'-O-methyl modified nucleoside
  modified_base 10: mod_base = OTHER; note = 2'-fluoro-modified nucleoside
  modified_base 11: mod_base = OTHER; note = 2'-O-methyl modified nucleoside
  modified_base 12: mod_base = OTHER; note = 2'-fluoro-modified nucleoside
  modified_base 13: mod_base = OTHER; note = 2'-O-methyl modified nucleoside
  modified_base 14: mod_base = OTHER; note = 2'-fluoro-modified nucleoside
  modified_base 15: mod_base = OTHER; note = 2'-O-methyl modified nucleoside
  modified_base 16: mod_base = OTHER; note = 2'-fluoro-modified nucleoside
  modified_base 17: mod_base = OTHER; note = 2'-O-methyl modified nucleoside
  modified_base 18: mod_base = OTHER; note = 2'-fluoro-modified nucleoside
  modified_base 19: mod_base = OTHER; note = 2'-O-methyl modified nucleoside with phosphorothioate linkage
  modified_base 20: mod_base = OTHER; note = 2'-O-methyl modified nucleoside with phosphorothioate linkage
  modified_base 21: mod_base = OTHER; note = 2'-O-methyl modified nucleoside
tcgtaacattctaataacatt

SEQ ID NO: 13009 - RNA, 21 nt, synthetic construct
  source 1..21: mol_type = other RNA
  modified_base 1: mod_base = OTHER; note = 2'-O-methyl modified nucleoside with phosphorothioate linkage
  modified_base 2: mod_base = OTHER; note = 2'-fluoro-modified nucleoside with phosphorothioate linkage
  modified_base 3: mod_base = OTHER; note = 2'-O-methyl modified nucleoside
  modified_base 4: mod_base = OTHER; note = 2'-O-methyl modified nucleoside
  modified_base 5: mod_base = OTHER; note = 2'-O-methyl modified nucleoside
  modified_base 6: mod_base = OTHER; note = 2'-fluoro-modified nucleoside
  modified_base 7: mod_base = OTHER; note = 2'-O-methyl modified nucleoside
  modified_base 8: mod_base = OTHER; note = 2'-fluoro-modified nucleoside
  modified_base 9: mod_base = OTHER; note = 2'-O-methyl modified nucleoside
  modified_base 10: mod_base = OTHER; note = 2'-fluoro-modified nucleoside
  modified_base 11: mod_base = OTHER; note = 2'-O-methyl modified nucleoside
  modified_base 12: mod_base = OTHER; note = 2'-fluoro-modified nucleoside
  modified_base 13: mod_base = OTHER; note = 2'-O-methyl modified nucleoside
  modified_base 14: mod_base = OTHER; note = 2'-fluoro-modified nucleoside
  modified_base 15: mod_base = OTHER; note = 2'-O-methyl modified nucleoside
  modified_base 16: mod_base = OTHER; note = 2'-fluoro-modified nucleoside
  modified_base 17: mod_base = OTHER; note = 2'-O-methyl modified nucleoside
  modified_base 18: mod_base = OTHER; note = 2'-fluoro-modified nucleoside
  modified_base 19: mod_base = OTHER; note = 2'-O-methyl modified nucleoside with phosphorothioate linkage
  modified_base 20: mod_base = OTHER; note = 2'-O-methyl modified nucleoside with phosphorothioate linkage
  modified_base 21: mod_base = OTHER; note = 2'-O-methyl modified nucleoside
tcgtaacattctaataacatt

SEQ ID NO: 13010 - RNA, 21 nt, synthetic construct
  source 1..21: mol_type = other RNA
  modified_base 1: mod_base = OTHER; note = 2'-O-methyl modified nucleoside with phosphorothioate linkage
  modified_base 2: mod_base = OTHER; note = 2'-fluoro-modified nucleoside with phosphorothioate linkage
  modified_base 3: mod_base = OTHER; note = 2'-O-methyl modified nucleoside
  modified_base 4: mod_base = OTHER; note = 2'-fluoro-modified nucleoside
  modified_base 5: mod_base = OTHER; note = 2'-O-methyl modified nucleoside
  modified_base 6: mod_base = OTHER; note = 2'-fluoro-modified nucleoside
  modified_base 7: mod_base = OTHER; note = 2'-O-methyl modified nucleoside
  modified_base 8: mod_base = OTHER; note = 2'-fluoro-modified nucleoside
  modified_base 9: mod_base = OTHER; note = 2'-O-methyl modified nucleoside
  modified_base 10: mod_base = OTHER; note = 2'-fluoro-modified nucleoside
  modified_base 11: mod_base = OTHER; note = 2'-O-methyl modified nucleoside
  modified_base 12: mod_base = OTHER; note = 2'-O-methyl modified nucleoside
  modified_base 13: mod_base = OTHER; note = 2'-O-methyl modified nucleoside
  modified_base 14: mod_base = OTHER; note = 2'-fluoro-modified nucleoside
  modified_base 15: mod_base = OTHER; note = 2'-O-methyl modified nucleoside
  modified_base 16: mod_base = OTHER; note = 2'-fluoro-modified nucleoside
  modified_base 17: mod_base = OTHER; note = 2'-O-methyl modified nucleoside
  modified_base 18: mod_base = OTHER; note = 2'-fluoro-modified nucleoside
  modified_base 19: mod_base = OTHER; note = 2'-O-methyl modified nucleoside with phosphorothioate linkage
  modified_base 20: mod_base = OTHER; note = 2'-O-methyl modified nucleoside with phosphorothioate linkage
  modified_base 21: mod_base = OTHER; note = 2'-O-methyl modified nucleoside
tcgtaacattctaataacatt

SEQ ID NO: 13011 - RNA, 21 nt, synthetic construct
  source 1..21: mol_type = other RNA
  modified_base 1: mod_base = OTHER; note = 2'-O-methyl modified nucleoside with phosphorothioate linkage
  modified_base 2: mod_base = OTHER; note = 2'-fluoro-modified nucleoside with phosphorothioate linkage
  modified_base 3: mod_base = OTHER; note = 2'-O-methyl modified nucleoside
  modified_base 4: mod_base = OTHER; note = 2'-fluoro-modified nucleoside
  modified_base 5: mod_base = OTHER; note = 2'-O-methyl modified nucleoside
  modified_base 6: mod_base = OTHER; note = 2'-fluoro-modified nucleoside
  modified_base 7: mod_base = OTHER; note = 2'-O-methyl modified nucleoside
  modified_base 8: mod_base = OTHER; note = 2'-fluoro-modified nucleoside
  modified_base 9: mod_base = OTHER; note = 2'-O-methyl modified nucleoside
  modified_base 10: mod_base = OTHER; note = 2'-O-methyl modified nucleoside
  modified_base 11: mod_base = OTHER; note = 2'-O-methyl modified nucleoside
  modified_base 12: mod_base = OTHER; note = 2'-fluoro-modified nucleoside
  modified_base 13: mod_base = OTHER; note = 2'-O-methyl modified nucleoside
  modified_base 14: mod_base = OTHER; note = 2'-fluoro-modified nucleoside
  modified_base 15: mod_base = OTHER; note = 2'-O-methyl modified nucleoside
  modified_base 16: mod_base = OTHER; note = 2'-fluoro-modified nucleoside
  modified_base 17: mod_base = OTHER; note = 2'-O-methyl modified nucleoside
  modified_base 18: mod_base = OTHER; note = 2'-fluoro-modified nucleoside
  modified_base 19: mod_base = OTHER; note = 2'-O-methyl modified nucleoside with phosphorothioate linkage
  modified_base 20: mod_base = OTHER; note = 2'-O-methyl modified nucleoside with phosphorothioate linkage
  modified_base 21: mod_base = OTHER; note = 2'-O-methyl modified nucleoside
tcgtaacattctaataacatt

SEQ ID NO: 13012 - RNA, 21 nt, synthetic construct
  source 1..21: mol_type = other RNA
  modified_base 1: mod_base = OTHER; note = 2'-O-methyl modified nucleoside with phosphorothioate linkage
  modified_base 2: mod_base = OTHER; note = 2'-fluoro-modified nucleoside with phosphorothioate linkage
  modified_base 3: mod_base = OTHER; note = 2'-O-methyl modified nucleoside
  modified_base 4: mod_base = OTHER; note = 2'-O-methyl modified nucleoside
  modified_base 5: mod_base = OTHER; note = 2'-O-methyl modified nucleoside
  modified_base 6: mod_base = OTHER; note = 2'-fluoro-modified nucleoside
  modified_base 7: mod_base = OTHER; note = 2'-O-methyl modified nucleoside
  modified_base 8: mod_base = OTHER; note = 2'-fluoro-modified nucleoside
  modified_base 9: mod_base = OTHER; note = 2'-O-methyl modified nucleoside
  modified_base 10: mod_base = OTHER; note = 2'-O-methyl modified nucleoside
  modified_base 11: mod_base = OTHER; note = 2'-O-methyl modified nucleoside
  modified_base 12: mod_base = OTHER; note = 2'-fluoro-modified nucleoside
  modified_base 13: mod_base = OTHER; note = 2'-O-methyl modified nucleoside
  modified_base 14: mod_base = OTHER; note = 2'-fluoro-modified nucleoside
  modified_base 15: mod_base = OTHER; note = 2'-O-methyl modified nucleoside
  modified_base 16: mod_base = OTHER; note = 2'-fluoro-modified nucleoside
  modified_base 17: mod_base = OTHER; note = 2'-O-methyl modified nucleoside
  modified_base 18: mod_base = OTHER; note = 2'-fluoro-modified nucleoside
  modified_base 19: mod_base = OTHER; note = 2'-O-methyl modified nucleoside with phosphorothioate linkage
  modified_base 20: mod_base = OTHER; note = 2'-O-methyl modified nucleoside with phosphorothioate linkage
  modified_base 21: mod_base = OTHER; note = 2'-O-methyl modified nucleoside
tcgtaacattctaataacatt

SEQ ID NO: 13013 - RNA, 21 nt, synthetic construct
  source 1..21: mol_type = other RNA
  modified_base 1: mod_base = OTHER; note = 2'-O-methyl modified nucleoside with phosphorothioate linkage
  modified_base 2: mod_base = OTHER; note = 2'-fluoro-modified nucleoside with phosphorothioate linkage
  modified_base 3: mod_base = OTHER; note = 2'-O-methyl modified nucleoside
  modified_base 4: mod_base = OTHER; note = 2'-O-methyl modified nucleoside
  modified_base 5: mod_base = OTHER; note = 2'-O-methyl modified nucleoside
  modified_base 6: mod_base = OTHER; note = 2'-fluoro-modified nucleoside
  modified_base 7: mod_base = OTHER; note = 2'-O-methyl modified nucleoside
  modified_base 8: mod_base = OTHER; note = 2'-fluoro-modified nucleoside
  modified_base 9: mod_base = OTHER; note = 2'-O-methyl modified nucleoside
  modified_base 10: mod_base = OTHER; note = 2'-fluoro-modified nucleoside
  modified_base 11: mod_base = OTHER; note = 2'-O-methyl modified nucleoside
  modified_base 12: mod_base = OTHER; note = 2'-O-methyl modified nucleoside
  modified_base 13: mod_base = OTHER; note = 2'-O-methyl modified nucleoside
  modified_base 14: mod_base = OTHER; note = 2'-fluoro-modified nucleoside
  modified_base 15: mod_base = OTHER; note = 2'-O-methyl modified nucleoside
  modified_base 16: mod_base = OTHER; note = 2'-fluoro-modified nucleoside
  modified_base 17: mod_base = OTHER; note = 2'-O-methyl modified nucleoside
  modified_base 18: mod_base = OTHER; note = 2'-fluoro-modified nucleoside
  modified_base 19: mod_base = OTHER; note = 2'-O-methyl modified nucleoside with phosphorothioate linkage
  modified_base 20: mod_base = OTHER; note = 2'-O-methyl modified nucleoside with phosphorothioate linkage
  modified_base 21: mod_base = OTHER; note = 2'-O-methyl modified nucleoside
tcgtaacattctaataacatt

SEQ ID NO: 13014 - RNA, 21 nt, synthetic construct
  source 1..21: mol_type = other RNA
  modified_base 1: mod_base = OTHER; note = 2'-O-methyl modified nucleoside with phosphorothioate linkage
  modified_base 2: mod_base = OTHER; note = 2'-fluoro-modified nucleoside with phosphorothioate linkage
  modified_base 3: mod_base = OTHER; note = 2'-O-methyl modified nucleoside
  modified_base 4: mod_base = OTHER; note = 2'-fluoro-modified nucleoside
  modified_base 5: mod_base = OTHER; note = 2'-O-methyl modified nucleoside
  modified_base 6: mod_base = OTHER; note = 2'-O-methyl modified nucleoside
  modified_base 7: mod_base = OTHER; note = 2'-fluoro-modified nucleoside
  modified_base 8: mod_base = OTHER; note = 2'-O-methyl modified nucleoside
  modified_base 9: mod_base = OTHER; note = 2'-O-methyl modified nucleoside
  modified_base 10: mod_base = OTHER; note = 2'-fluoro-modified nucleoside
  modified_base 11: mod_base = OTHER; note = 2'-O-methyl modified nucleoside
  modified_base 12: mod_base = OTHER; note = 2'-fluoro-modified nucleoside
  modified_base 13: mod_base = OTHER; note = 2'-O-methyl modified nucleoside
  modified_base 14: mod_base = OTHER; note = 2'-fluoro-modified nucleoside
  modified_base 15: mod_base = OTHER; note = 2'-O-methyl modified nucleoside
  modified_base 16: mod_base = OTHER; note = 2'-fluoro-modified nucleoside
  modified_base 17: mod_base = OTHER; note = 2'-O-methyl modified nucleoside
  modified_base 18: mod_base = OTHER; note = 2'-fluoro-modified nucleoside
  modified_base 19: mod_base = OTHER; note = 2'-O-methyl modified nucleoside with phosphorothioate linkage
  modified_base 20: mod_base = OTHER; note = 2'-O-methyl modified nucleoside with phosphorothioate linkage
  modified_base 21: mod_base = OTHER; note = 2'-O-methyl modified nucleoside
tcgtaacattctaataacatt

SEQ ID NO: 13015 - RNA, 21 nt, synthetic construct
  source 1..21: mol_type = other RNA
  modified_base 1: mod_base = OTHER; note = 2'-O-methyl modified nucleoside with phosphorothioate linkage
  modified_base 2: mod_base = OTHER; note = 2'-fluoro-modified nucleoside with phosphorothioate linkage
  modified_base 3: mod_base = OTHER; note = 2'-O-methyl modified nucleoside
  modified_base 4: mod_base = OTHER; note = 2'-fluoro-modified nucleoside
  modified_base 5: mod_base = OTHER; note = 2'-O-methyl modified nucleoside
  modified_base 6: mod_base = OTHER; note = 2'-O-methyl modified nucleoside
  modified_base 7: mod_base = OTHER; note = 2'-fluoro-modified nucleoside
  modified_base 8: mod_base = OTHER; note = 2'-O-methyl modified nucleoside
  modified_base 9: mod_base = OTHER; note = 2'-O-methyl modified nucleoside
  modified_base 10: mod_base = OTHER; note = 2'-fluoro-modified nucleoside
  modified_base 11: mod_base = OTHER; note = 2'-O-methyl modified nucleoside
  modified_base 12: mod_base = OTHER; note = 2'-O-methyl modified nucleoside
  modified_base 13: mod_base = OTHER; note = 2'-O-methyl modified nucleoside
  modified_base 14: mod_base = OTHER; note = 2'-fluoro-modified nucleoside
  modified_base 15: mod_base = OTHER; note = 2'-O-methyl modified nucleoside
  modified_base 16: mod_base = OTHER; note = 2'-fluoro-modified nucleoside
  modified_base 17: mod_base = OTHER; note = 2'-O-methyl modified nucleoside
  modified_base 18: mod_base = OTHER; note = 2'-fluoro-modified nucleoside
  modified_base 19: mod_base = OTHER; note = 2'-O-methyl modified nucleoside with phosphorothioate linkage
  modified_base 20: mod_base = OTHER; note = 2'-O-methyl modified nucleoside with phosphorothioate linkage
  modified_base 21: mod_base = OTHER; note = 2'-O-methyl modified nucleoside
tcgtaacattctaataacatt

SEQ ID NO: 13016 - RNA, 21 nt, synthetic construct
  source 1..21: mol_type = other RNA
  modified_base 1: mod_base = OTHER; note = 2'-O-methyl modified nucleoside with phosphorothioate linkage
  modified_base 2: mod_base = OTHER; note = 2'-fluoro-modified nucleoside with phosphorothioate linkage
  modified_base 3: mod_base = OTHER; note = 2'-O-methyl modified nucleoside
  modified_base 4: mod_base = OTHER; note = 2'-O-methyl modified nucleoside
  modified_base 5: mod_base = OTHER; note = 2'-fluoro-modified nucleoside
  modified_base 6: mod_base = OTHER; note = 2'-O-methyl modified nucleoside
  modified_base 7: mod_base = OTHER; note = 2'-fluoro-modified nucleoside
  modified_base 8: mod_base = OTHER; note = 2'-O-methyl modified nucleoside
  modified_base 9: mod_base = OTHER; note = 2'-O-methyl modified nucleoside
  modified_base 10: mod_base = OTHER; note = 2'-fluoro-modified nucleoside
  modified_base 11: mod_base = OTHER; note = 2'-O-methyl modified nucleoside
  modified_base 12: mod_base = OTHER; note = 2'-fluoro-modified nucleoside
  modified_base 13: mod_base = OTHER; note = 2'-O-methyl modified nucleoside
  modified_base 14: mod_base = OTHER; note = 2'-fluoro-modified nucleoside
  modified_base 15: mod_base = OTHER; note = 2'-O-methyl modified nucleoside
  modified_base 16: mod_base = OTHER; note = 2'-fluoro-modified nucleoside
  modified_base 17: mod_base = OTHER; note = 2'-O-methyl modified nucleoside
  modified_base 18: mod_base = OTHER; note = 2'-fluoro-modified nucleoside
  modified_base 19: mod_base = OTHER; note = 2'-O-methyl modified nucleoside with phosphorothioate linkage
  modified_base 20: mod_base = OTHER; note = 2'-O-methyl modified nucleoside with phosphorothioate linkage
  modified_base 21: mod_base = OTHER; note = 2'-O-methyl modified nucleoside
tcgtaacattctaataacatt

SEQ ID NO: 13017 - RNA, 21 nt, synthetic construct
  source 1..21: mol_type = other RNA
  modified_base 1: mod_base = OTHER; note = 2'-O-methyl modified nucleoside with phosphorothioate linkage
  modified_base 2: mod_base = OTHER; note = 2'-fluoro-modified nucleoside with phosphorothioate linkage
  modified_base 3: mod_base = OTHER; note = 2'-O-methyl modified nucleoside
  modified_base 4: mod_base = OTHER; note = 2'-fluoro-modified nucleoside
  modified_base 5: mod_base = OTHER; note = 2'-O-methyl modified nucleoside
  modified_base 6: mod_base = OTHER; note = 2'-fluoro-modified nucleoside
  modified_base 7: mod_base = OTHER; note = 2'-O-methyl modified nucleoside
  modified_base 8: mod_base = OTHER; note = 2'-fluoro-modified nucleoside
  modified_base 9: mod_base = OTHER; note = 2'-O-methyl modified nucleoside
  modified_base 10: mod_base = OTHER; note = 2'-fluoro-modified nucleoside
  modified_base 11: mod_base = OTHER; note = 2'-O-methyl modified nucleoside
  modified_base 12: mod_base = OTHER; note = 2'-fluoro-modified nucleoside
  modified_base 13: mod_base = OTHER; note = 2'-O-methyl modified nucleoside
  modified_base 14: mod_base = OTHER; note = 2'-fluoro-modified nucleoside
  modified_base 15: mod_base = OTHER; note = 2'-O-methyl modified nucleoside
  modified_base 16: mod_base = OTHER; note = 2'-fluoro-modified nucleoside
  modified_base 17: mod_base = OTHER; note = 2'-O-methyl modified nucleoside
  modified_base 18: mod_base = OTHER; note = 2'-fluoro-modified nucleoside
  modified_base 19: mod_base = OTHER; note = 2'-O-methyl modified nucleoside with phosphorothioate linkage
  modified_base 20: mod_base = OTHER; note = 2'-O-methyl modified nucleoside with phosphorothioate linkage
  modified_base 21: mod_base = OTHER; note = 2'-O-methyl modified nucleoside
tcgatcataggagattccatt

SEQ ID NO: 13018 - RNA, 21 nt, synthetic construct
  source 1..21: mol_type = other RNA
  modified_base 1: mod_base = OTHER; note = 2'-O-methyl modified nucleoside with phosphorothioate linkage
  modified_base 2: mod_base = OTHER; note = 2'-fluoro-modified nucleoside with phosphorothioate linkage
  modified_base 3: mod_base = OTHER; note = 2'-O-methyl modified nucleoside
  modified_base 4: mod_base = OTHER; note = 2'-O-methyl modified nucleoside
  modified_base 5: mod_base = OTHER; note = 2'-O-methyl modified nucleoside
  modified_base 6: mod_base = OTHER; note = 2'-fluoro-modified nucleoside
  modified_base 7: mod_base = OTHER; note = 2'-O-methyl modified nucleoside
  modified_base 8: mod_base = OTHER; note = 2'-fluoro-modified nucleoside
  modified_base 9: mod_base = OTHER; note = 2'-O-methyl modified nucleoside
  modified_base 10: mod_base = OTHER; note = 2'-fluoro-modified nucleoside
  modified_base 11: mod_base = OTHER; note = 2'-O-methyl modified nucleoside
  modified_base 12: mod_base = OTHER; note = 2'-fluoro-modified nucleoside
  modified_base 13: mod_base = OTHER; note = 2'-O-methyl modified nucleoside
  modified_base 14: mod_base = OTHER; note = 2'-fluoro-modified nucleoside
  modified_base 15: mod_base = OTHER; note = 2'-O-methyl modified nucleoside
  modified_base 16: mod_base = OTHER; note = 2'-fluoro-modified nucleoside
  modified_base 17: mod_base = OTHER; note = 2'-O-methyl modified nucleoside
  modified_base 18: mod_base = OTHER; note = 2'-fluoro-modified nucleoside
  modified_base 19: mod_base = OTHER; note = 2'-O-methyl modified nucleoside with phosphorothioate linkage
  modified_base 20: mod_base = OTHER; note = 2'-O-methyl modified nucleoside with phosphorothioate linkage
  modified_base 21: mod_base = OTHER; note = 2'-O-methyl modified nucleoside
tcgatcataggagattccatt

SEQ ID NO: 13019 - RNA, 21 nt, synthetic construct
  source 1..21: mol_type = other RNA
  modified_base 1: mod_base = OTHER; note = 2'-O-methyl modified nucleoside with phosphorothioate linkage
  modified_base 2: mod_base = OTHER; note = 2'-fluoro-modified nucleoside with phosphorothioate linkage
  modified_base 3: mod_base = OTHER; note = 2'-O-methyl modified nucleoside
  modified_base 4: mod_base = OTHER; note = 2'-fluoro-modified nucleoside
  modified_base 5: mod_base = OTHER; note = 2'-O-methyl modified nucleoside
  modified_base 6: mod_base = OTHER; note = 2'-O-methyl modified nucleoside
  modified_base 7: mod_base = OTHER; note = 2'-O-methyl modified nucleoside
  modified_base 8: mod_base = OTHER; note = 2'-fluoro-modified nucleoside
  modified_base 9: mod_base = OTHER; note = 2'-O-methyl modified nucleoside
  modified_base 10: mod_base = OTHER; note = 2'-fluoro-modified nucleoside
  modified_base 11: mod_base = OTHER; note = 2'-O-methyl modified nucleoside
  modified_base 12: mod_base = OTHER; note = 2'-fluoro-modified nucleoside
  modified_base 13: mod_base = OTHER; note = 2'-O-methyl modified nucleoside
  modified_base 14: mod_base = OTHER; note = 2'-fluoro-modified nucleoside
  modified_base 15: mod_base = OTHER; note = 2'-O-methyl modified nucleoside
  modified_base 16: mod_base = OTHER; note = 2'-fluoro-modified nucleoside
  modified_base 17: mod_base = OTHER; note = 2'-O-methyl modified nucleoside
  modified_base 18: mod_base = OTHER; note = 2'-fluoro-modified nucleoside
  modified_base 19: mod_base = OTHER; note = 2'-O-methyl modified nucleoside with phosphorothioate linkage
  modified_base 20: mod_base = OTHER; note = 2'-O-methyl modified nucleoside with phosphorothioate linkage
  modified_base 21: mod_base = OTHER; note = 2'-O-methyl modified nucleoside
tcgatcataggagattccatt

SEQ ID NO: 13020 - RNA, 21 nt, synthetic construct
  source 1..21: mol_type = other RNA
  modified_base 1: mod_base = OTHER; note = 2'-O-methyl modified nucleoside with phosphorothioate linkage
  modified_base 2: mod_base = OTHER; note = 2'-fluoro-modified nucleoside with phosphorothioate linkage
  modified_base 3: mod_base = OTHER; note = 2'-O-methyl modified nucleoside
  modified_base 4: mod_base = OTHER; note = 2'-fluoro-modified nucleoside
  modified_base 5: mod_base = OTHER; note = 2'-O-methyl modified nucleoside
  modified_base 6: mod_base = OTHER; note = 2'-fluoro-modified nucleoside
  modified_base 7: mod_base = OTHER; note = 2'-O-methyl modified nucleoside
  modified_base 8: mod_base = OTHER; note = 2'-fluoro-modified nucleoside
  modified_base 9: mod_base = OTHER; note = 2'-O-methyl modified nucleoside
  modified_base 10: mod_base = OTHER; note = 2'-fluoro-modified nucleoside
  modified_base 11: mod_base = OTHER; note = 2'-O-methyl modified nucleoside
  modified_base 12: mod_base = OTHER; note = 2'-O-methyl modified nucleoside
  modified_base 13: mod_base = OTHER; note = 2'-O-methyl modified nucleoside
  modified_base 14: mod_base = OTHER; note = 2'-fluoro-modified nucleoside
  modified_base 15: mod_base = OTHER; note = 2'-O-methyl modified nucleoside
  modified_base 16: mod_base = OTHER; note = 2'-fluoro-modified nucleoside
  modified_base 17: mod_base = OTHER; note = 2'-O-methyl modified nucleoside
  modified_base 18: mod_base = OTHER; note = 2'-fluoro-modified nucleoside
  modified_base 19: mod_base = OTHER; note = 2'-O-methyl modified nucleoside with phosphorothioate linkage
  modified_base 20: mod_base = OTHER; note = 2'-O-methyl modified nucleoside with phosphorothioate linkage
  modified_base 21: mod_base = OTHER; note = 2'-O-methyl modified nucleoside
tcgatcataggagattccatt

SEQ ID NO: 13021 - RNA, 21 nt, synthetic construct
  source 1..21: mol_type = other RNA
  modified_base 1: mod_base = OTHER; note = 2'-O-methyl modified nucleoside with phosphorothioate linkage
  modified_base 2: mod_base = OTHER; note = 2'-fluoro-modified nucleoside with phosphorothioate linkage
  modified_base 3: mod_base = OTHER; note = 2'-O-methyl modified nucleoside
  modified_base 4: mod_base = OTHER; note = 2'-O-methyl modified nucleoside
  modified_base 5: mod_base = OTHER; note = 2'-O-methyl modified nucleoside
  modified_base 6: mod_base = OTHER; note = 2'-fluoro-modified nucleoside
  modified_base 7: mod_base = OTHER; note = 2'-O-methyl modified nucleoside
  modified_base 8: mod_base = OTHER; note = 2'-fluoro-modified nucleoside
  modified_base 9: mod_base = OTHER; note = 2'-O-methyl modified nucleoside
  modified_base 10: mod_base = OTHER; note = 2'-fluoro-modified nucleoside
  modified_base 11: mod_base = OTHER; note = 2'-O-methyl modified nucleoside
  modified_base 12: mod_base = OTHER; note = 2'-O-methyl modified nucleoside
  modified_base 13: mod_base = OTHER; note = 2'-O-methyl modified nucleoside
  modified_base 14: mod_base = OTHER; note = 2'-fluoro-modified nucleoside
  modified_base 15: mod_base = OTHER; note = 2'-O-methyl modified nucleoside
  modified_base 16: mod_base = OTHER; note = 2'-fluoro-modified nucleoside
  modified_base 17: mod_base = OTHER; note = 2'-O-methyl modified nucleoside
  modified_base 18: mod_base = OTHER; note = 2'-fluoro-modified nucleoside
  modified_base 19: mod_base = OTHER; note = 2'-O-methyl modified nucleoside with phosphorothioate linkage
  modified_base 20: mod_base = OTHER; note = 2'-O-methyl modified nucleoside with phosphorothioate linkage
  modified_base 21: mod_base = OTHER; note = 2'-O-methyl modified nucleoside
tcgatcataggagattccatt

SEQ ID NO: 13022 - RNA, 21 nt, synthetic construct
  source 1..21: mol_type = other RNA
  modified_base 1: mod_base = OTHER; note = 2'-O-methyl modified nucleoside with phosphorothioate linkage
  modified_base 2: mod_base = OTHER; note = 2'-fluoro-modified nucleoside with phosphorothioate linkage
  modified_base 3: mod_base = OTHER; note = 2'-O-methyl modified nucleoside
  modified_base 4: mod_base = OTHER; note = 2'-fluoro-modified nucleoside
  modified_base 5: mod_base = OTHER; note = 2'-O-methyl modified nucleoside
  modified_base 6: mod_base = OTHER; note = 2'-O-methyl modified nucleoside
  modified_base 7: mod_base = OTHER; note = 2'-fluoro-modified nucleoside
  modified_base 8: mod_base = OTHER; note = 2'-O-methyl modified nucleoside
  modified_base 9: mod_base = OTHER; note = 2'-O-methyl modified nucleoside
  modified_base 10: mod_base = OTHER; note = 2'-fluoro-modified nucleoside
  modified_base 11: mod_base = OTHER; note = 2'-O-methyl modified nucleoside
  modified_base 12: mod_base = OTHER; note = 2'-fluoro-modified nucleoside
  modified_base 13: mod_base = OTHER; note = 2'-O-methyl modified nucleoside
  modified_base 14: mod_base = OTHER; note = 2'-fluoro-modified nucleoside
  modified_base 15: mod_base = OTHER; note = 2'-O-methyl modified nucleoside
  modified_base 16: mod_base = OTHER; note = 2'-fluoro-modified nucleoside
  modified_base 17: mod_base = OTHER; note = 2'-O-methyl modified nucleoside
  modified_base 18: mod_base = OTHER; note = 2'-fluoro-modified nucleoside
  modified_base 19: mod_base = OTHER; note = 2'-O-methyl modified nucleoside with phosphorothioate linkage
  modified_base 20: mod_base = OTHER; note = 2'-O-methyl modified nucleoside with phosphorothioate linkage
  modified_base 21: mod_base = OTHER; note = 2'-O-methyl modified nucleoside
tcgatcataggagattccatt

SEQ ID NO: 13023 - RNA, 21 nt, synthetic construct
  source 1..21: mol_type = other RNA
  modified_base 1: mod_base = OTHER; note = 2'-O-methyl modified nucleoside with phosphorothioate linkage
  modified_base 2: mod_base = OTHER; note = 2'-fluoro-modified nucleoside with phosphorothioate linkage
  modified_base 3: mod_base = OTHER; note = 2'-O-methyl modified nucleoside
  modified_base 4: mod_base = OTHER; note = 2'-O-methyl modified nucleoside
  modified_base 5: mod_base = OTHER; note = 2'-O-methyl modified nucleoside
  modified_base 6: mod_base = OTHER; note = 2'-O-methyl modified nucleoside
  modified_base 7: mod_base = OTHER; note = 2'-fluoro-modified nucleoside
  modified_base 8: mod_base = OTHER; note = 2'-O-methyl modified nucleoside
  modified_base 9: mod_base = OTHER; note = 2'-fluoro-modified nucleoside
  modified_base 10: mod_base = OTHER; note = 2'-O-methyl modified nucleoside
  modified_base 11: mod_base = OTHER; note = 2'-O-methyl modified nucleoside
  modified_base 12: mod_base = OTHER; note = 2'-fluoro-modified nucleoside
  modified_base 13: mod_base = OTHER; note = 2'-O-methyl modified nucleoside
  modified_base 14: mod_base = OTHER; note = 2'-fluoro-modified nucleoside
  modified_base 15: mod_base = OTHER; note = 2'-O-methyl modified nucleoside
  modified_base 16: mod_base = OTHER; note = 2'-fluoro-modified nucleoside
  modified_base 17: mod_base = OTHER; note = 2'-O-methyl modified nucleoside
  modified_base 18: mod_base = OTHER; note = 2'-fluoro-modified nucleoside
  modified_base 19: mod_base = OTHER; note = 2'-O-methyl modified nucleoside with phosphorothioate linkage
  modified_base 20: mod_base = OTHER; note = 2'-O-methyl modified nucleoside with phosphorothioate linkage
  modified_base 21: mod_base = OTHER; note = 2'-O-methyl modified nucleoside
tcgatcataggagattccatt

SEQ ID NO: 13024 - RNA, 21 nt, synthetic construct
  source 1..21: mol_type = other RNA
  modified_base 1: mod_base = OTHER; note = 2'-O-methyl modified nucleoside with phosphorothioate linkage
  modified_base 2: mod_base = OTHER; note = 2'-fluoro-modified nucleoside with phosphorothioate linkage
  modified_base 3: mod_base = OTHER; note = 2'-O-methyl modified nucleoside
  modified_base 4: mod_base = OTHER; note = 2'-fluoro-modified nucleoside
  modified_base 5: mod_base = OTHER; note = 2'-O-methyl modified nucleoside
  modified_base 6: mod_base = OTHER; note = 2'-O-methyl modified nucleoside
  modified_base 7: mod_base = OTHER; note = 2'-fluoro-modified nucleoside
  modified_base 8: mod_base = OTHER; note = 2'-O-methyl modified nucleoside
  modified_base 9: mod_base = OTHER; note = 2'-fluoro-modified nucleoside
  modified_base 10: mod_base = OTHER; note = 2'-O-methyl modified nucleoside
  modified_base 11: mod_base = OTHER; note = 2'-O-methyl modified nucleoside
  modified_base 12: mod_base = OTHER; note = 2'-O-methyl modified nucleoside
  modified_base 13: mod_base = OTHER; note = 2'-O-methyl modified nucleoside
  modified_base 14: mod_base = OTHER; note = 2'-fluoro-modified nucleoside
  modified_base 15: mod_base = OTHER; note = 2'-O-methyl modified nucleoside
  modified_base 16: mod_base = OTHER; note = 2'-fluoro-modified nucleoside
  modified_base 17: mod_base = OTHER; note = 2'-O-methyl modified nucleoside
  modified_base 18: mod_base = OTHER; note = 2'-fluoro-modified nucleoside
  modified_base 19: mod_base = OTHER; note = 2'-O-methyl modified nucleoside with phosphorothioate linkage
  modified_base 20: mod_base = OTHER; note = 2'-O-methyl modified nucleoside with phosphorothioate linkage
  modified_base 21: mod_base = OTHER; note = 2'-O-methyl modified nucleoside
tcgatcataggagattccatt

SEQ ID NO: 13025 - RNA, 21 nt, synthetic construct
  source 1..21: mol_type = other RNA
  modified_base 1: mod_base = OTHER; note = 2'-O-methyl modified nucleoside with phosphorothioate linkage
  modified_base 2: mod_base = OTHER; note = 2'-fluoro-modified nucleoside with phosphorothioate linkage
  modified_base 3: mod_base = OTHER; note = 2'-O-methyl modified nucleoside
  modified_base 4: mod_base = OTHER; note = 2'-fluoro-modified nucleoside
  modified_base 5: mod_base = OTHER; note = 2'-O-methyl modified nucleoside
  modified_base 6: mod_base = OTHER; note = 2'-fluoro-modified nucleoside
  modified_base 7: mod_base = OTHER; note = 2'-O-methyl modified nucleoside
  modified_base 8: mod_base = OTHER; note = 2'-fluoro-modified nucleoside
  modified_base 9: mod_base = OTHER; note = 2'-O-methyl modified nucleoside
  modified_base 10: mod_base = OTHER; note = 2'-fluoro-modified nucleoside
  modified_base 11: mod_base = OTHER; note = 2'-O-methyl modified nucleoside
  modified_base 12: mod_base = OTHER; note = 2'-fluoro-modified nucleoside
  modified_base 13: mod_base = OTHER; note = 2'-O-methyl modified nucleoside
  modified_base 14: mod_base = OTHER; note = 2'-fluoro-modified nucleoside
  modified_base 15: mod_base = OTHER; note = 2'-O-methyl modified nucleoside
  modified_base 16: mod_base = OTHER; note = 2'-fluoro-modified nucleoside
  modified_base 17: mod_base = OTHER; note = 2'-O-methyl modified nucleoside
  modified_base 18: mod_base = OTHER; note = 2'-fluoro-modified nucleoside
  modified_base 19: mod_base = OTHER; note = 2'-O-methyl modified nucleoside with phosphorothioate linkage
  modified_base 20: mod_base = OTHER; note = 2'-O-methyl modified nucleoside with phosphorothioate linkage
  modified_base 21: mod_base = OTHER; note = 2'-O-methyl modified nucleoside
tgacttgctagcagtgaattt

SEQ ID NO: 13026 - RNA, 21 nt, synthetic construct
  source 1..21: mol_type = other RNA
  modified_base 1: mod_base = OTHER; note = 2'-O-methyl modified nucleoside with phosphorothioate linkage
  modified_base 2: mod_base = OTHER; note = 2'-fluoro-modified nucleoside with phosphorothioate linkage
  modified_base 3: mod_base = OTHER; note = 2'-O-methyl modified nucleoside
  modified_base 4: mod_base = OTHER; note = 2'-O-methyl modified nucleoside
  modified_base 5: mod_base = OTHER; note = 2'-O-methyl modified nucleoside
  modified_base 6: mod_base = OTHER; note = 2'-fluoro-modified nucleoside
  modified_base 7: mod_base = OTHER; note = 2'-O-methyl modified nucleoside
  modified_base 8: mod_base = OTHER; note = 2'-fluoro-modified nucleoside
  modified_base 9: mod_base = OTHER; note = 2'-O-methyl modified nucleoside
  modified_base 10: mod_base = OTHER; note = 2'-fluoro-modified nucleoside
  modified_base 11: mod_base = OTHER; note = 2'-O-methyl modified nucleoside
  modified_base 12: mod_base = OTHER; note = 2'-fluoro-modified nucleoside
  modified_base 13: mod_base = OTHER; note = 2'-O-methyl modified nucleoside
  modified_base 14: mod_base = OTHER; note = 2'-fluoro-modified nucleoside
  modified_base 15: mod_base = OTHER; note = 2'-O-methyl modified nucleoside
  modified_base 16: mod_base = OTHER; note = 2'-fluoro-modified nucleoside
  modified_base 17: mod_base = OTHER; note = 2'-O-methyl modified nucleoside
  modified_base 18: mod_base = OTHER; note = 2'-fluoro-modified nucleoside
  modified_base 19: mod_base = OTHER; note = 2'-O-methyl modified nucleoside with phosphorothioate linkage
  modified_base 20: mod_base = OTHER; note = 2'-O-methyl modified nucleoside with phosphorothioate linkage
  modified_base 21: mod_base = OTHER; note = 2'-O-methyl modified nucleoside
tgacttgctagcagtgaattt

SEQ ID NO: 13027 - RNA, 21 nt, synthetic construct
  source 1..21: mol_type = other RNA
  modified_base 1: mod_base = OTHER; note = 2'-O-methyl modified nucleoside with phosphorothioate linkage
  modified_base 2: mod_base = OTHER; note = 2'-fluoro-modified nucleoside with phosphorothioate linkage
  modified_base 3: mod_base = OTHER; note = 2'-O-methyl modified nucleoside
  modified_base 4: mod_base = OTHER; note = 2'-fluoro-modified nucleoside
  modified_base 5: mod_base = OTHER; note = 2'-O-methyl modified nucleoside
  modified_base 6: mod_base = OTHER; note = 2'-fluoro-modified nucleoside
  modified_base 7: mod_base = OTHER; note = 2'-O-methyl modified nucleoside
  modified_base 8: mod_base = OTHER; note = 2'-fluoro-modified nucleoside
  modified_base 9: mod_base = OTHER; note = 2'-O-methyl modified nucleoside
  modified_base 10: mod_base = OTHER; note = 2'-fluoro-modified nucleoside
  modified_base 11: mod_base = OTHER; note = 2'-O-methyl modified nucleoside
  modified_base 12: mod_base = OTHER; note = 2'-O-methyl modified nucleoside
  modified_base 13: mod_base = OTHER; note = 2'-O-methyl modified nucleoside
  modified_base 14: mod_base = OTHER; note = 2'-fluoro-modified nucleoside
  modified_base 15: mod_base = OTHER; note = 2'-O-methyl modified nucleoside
  modified_base 16: mod_base = OTHER; note = 2'-fluoro-modified nucleoside
  modified_base 17: mod_base = OTHER; note = 2'-O-methyl modified nucleoside
  modified_base 18: mod_base = OTHER; note = 2'-fluoro-modified nucleoside
  modified_base 19: mod_base = OTHER; note = 2'-O-methyl modified nucleoside with phosphorothioate linkage
  modified_base 20: mod_base = OTHER; note = 2'-O-methyl modified nucleoside with phosphorothioate linkage
  modified_base 21: mod_base = OTHER; note = 2'-O-methyl modified nucleoside
tgacttgctagcagtgaattt

SEQ ID NO: 13028 - RNA, 21 nt, synthetic construct
  source 1..21: mol_type = other RNA
  modified_base 1: mod_base = OTHER; note = 2'-O-methyl modified nucleoside with phosphorothioate linkage
  modified_base 2: mod_base = OTHER; note = 2'-fluoro-modified nucleoside with phosphorothioate linkage
  modified_base 3: mod_base = OTHER; note = 2'-O-methyl modified nucleoside
  modified_base 4: mod_base = OTHER; note = 2'-O-methyl modified nucleoside
  modified_base 5: mod_base = OTHER; note = 2'-O-methyl modified nucleoside
  modified_base 6: mod_base = OTHER; note = 2'-fluoro-modified nucleoside
  modified_base 7: mod_base = OTHER; note = 2'-O-methyl modified nucleoside
  modified_base 8: mod_base = OTHER; note = 2'-fluoro-modified nucleoside
  modified_base 9: mod_base = OTHER; note = 2'-O-methyl modified nucleoside
  modified_base 10: mod_base = OTHER; note = 2'-fluoro-modified nucleoside
  modified_base 11: mod_base = OTHER; note = 2'-O-methyl modified nucleoside
  modified_base 12: mod_base = OTHER; note = 2'-O-methyl modified nucleoside
  modified_base 13: mod_base = OTHER; note = 2'-O-methyl modified nucleoside
  modified_base 14: mod_base = OTHER; note = 2'-fluoro-modified nucleoside
  modified_base 15: mod_base = OTHER; note = 2'-O-methyl modified nucleoside
  modified_base 16: mod_base = OTHER; note = 2'-fluoro-modified nucleoside
  modified_base 17: mod_base = OTHER; note = 2'-O-methyl modified nucleoside
  modified_base 18: mod_base = OTHER; note = 2'-fluoro-modified nucleoside
  modified_base 19: mod_base = OTHER; note = 2'-O-methyl modified nucleoside with phosphorothioate linkage
  modified_base 20: mod_base = OTHER; note = 2'-O-methyl modified nucleoside with phosphorothioate linkage
  modified_base 21: mod_base = OTHER; note = 2'-O-methyl modified nucleoside
tgacttgctagcagtgaattt

SEQ ID NO: 13029 - RNA, 21 nt, synthetic construct
  source 1..21: mol_type = other RNA
  modified_base 1: mod_base = OTHER; note = 2'-O-methyl modified nucleoside with phosphorothioate linkage
  modified_base 2: mod_base = OTHER; note = 2'-fluoro-modified nucleoside with phosphorothioate linkage
  modified_base 3: mod_base = OTHER; note = 2'-O-methyl modified nucleoside
  modified_base 4: mod_base = OTHER; note = 2'-O-methyl modified nucleoside
  modified_base 5: mod_base = OTHER; note = 2'-O-methyl modified nucleoside
  modified_base 6: mod_base = OTHER; note = 2'-fluoro-modified nucleoside
  modified_base 7: mod_base = OTHER; note = 2'-O-methyl modified nucleoside
  modified_base 8: mod_base = OTHER; note = 2'-fluoro-modified nucleoside
  modified_base 9: mod_base = OTHER; note = 2'-O-methyl modified nucleoside
  modified_base 10: mod_base = OTHER; note = 2'-O-methyl modified nucleoside
  modified_base 11: mod_base = OTHER; note = 2'-O-methyl modified nucleoside
  modified_base 12: mod_base = OTHER; note = 2'-fluoro-modified nucleoside
  modified_base 13: mod_base = OTHER; note = 2'-O-methyl modified nucleoside
  modified_base 14: mod_base = OTHER; note = 2'-fluoro-modified nucleoside
  modified_base 15: mod_base = OTHER; note = 2'-O-methyl modified nucleoside
  modified_base 16: mod_base = OTHER; note = 2'-fluoro-modified nucleoside
  modified_base 17: mod_base = OTHER; note = 2'-O-methyl modified nucleoside
  modified_base 18: mod_base = OTHER; note = 2'-fluoro-modified nucleoside
  modified_base 19: mod_base = OTHER; note = 2'-O-methyl modified nucleoside with phosphorothioate linkage
  modified_base 20: mod_base = OTHER; note = 2'-O-methyl modified nucleoside with phosphorothioate linkage
  modified_base 21: mod_base = OTHER; note = 2'-O-methyl modified nucleoside
tgacttgctagcagtgaattt

SEQ ID NO: 13030 - RNA, 21 nt, synthetic construct
  source 1..21: mol_type = other RNA
  modified_base 1: mod_base = OTHER; note = 2'-O-methyl modified nucleoside with phosphorothioate linkage
  modified_base 2: mod_base = OTHER; note = 2'-fluoro-modified nucleoside with phosphorothioate linkage
  modified_base 3: mod_base = OTHER; note = 2'-O-methyl modified nucleoside
  modified_base 4: mod_base = OTHER; note = 2'-fluoro-modified nucleoside
  modified_base 5: mod_base = OTHER; note = 2'-O-methyl modified nucleoside
  modified_base 6: mod_base = OTHER; note = 2'-O-methyl modified nucleoside
  modified_base 7: mod_base = OTHER; note = 2'-fluoro-modified nucleoside
  modified_base 8: mod_base = OTHER; note = 2'-O-methyl modified nucleoside
  modified_base 9: mod_base = OTHER; note = 2'-O-methyl modified nucleoside
  modified_base 10: mod_base = OTHER; note = 2'-fluoro-modified nucleoside
  modified_base 11: mod_base = OTHER; note = 2'-O-methyl modified nucleoside
  modified_base 12: mod_base = OTHER; note = 2'-fluoro-modified nucleoside
  modified_base 13: mod_base = OTHER; note = 2'-O-methyl modified nucleoside
  modified_base 14: mod_base = OTHER; note = 2'-fluoro-modified nucleoside
  modified_base 15: mod_base = OTHER; note = 2'-O-methyl modified nucleoside
  modified_base 16: mod_base = OTHER; note = 2'-fluoro-modified nucleoside
  modified_base 17: mod_base = OTHER; note = 2'-O-methyl modified nucleoside
  modified_base 18: mod_base = OTHER; note = 2'-fluoro-modified nucleoside
  modified_base 19: mod_base = OTHER; note = 2'-O-methyl modified nucleoside with phosphorothioate linkage
  modified_base 20: mod_base = OTHER; note = 2'-O-methyl modified nucleoside with phosphorothioate linkage
  modified_base 21: mod_base = OTHER; note = 2'-O-methyl modified nucleoside
tgacttgctagcagtgaattt

SEQ ID NO: 13031 - RNA, 21 nt, synthetic construct
  source 1..21: mol_type = other RNA
  modified_base 1: mod_base = OTHER; note = 2'-O-methyl modified nucleoside with phosphorothioate linkage
  modified_base 2: mod_base = OTHER; note = 2'-fluoro-modified nucleoside with phosphorothioate linkage
  modified_base 3: mod_base = OTHER; note = 2'-O-methyl modified nucleoside
  modified_base 4: mod_base = OTHER; note = 2'-O-methyl modified nucleoside
  modified_base 5: mod_base = OTHER; note = 2'-fluoro-modified nucleoside
  modified_base 6: mod_base = OTHER; note = 2'-O-methyl modified nucleoside
  modified_base 7: mod_base = OTHER; note = 2'-fluoro-modified nucleoside
  modified_base 8: mod_base = OTHER; note = 2'-O-methyl modified nucleoside
  modified_base 9: mod_base = OTHER; note = 2'-O-methyl modified nucleoside
  modified_base 10: mod_base = OTHER; note = 2'-fluoro-modified nucleoside
  modified_base 11: mod_base = OTHER; note = 2'-O-methyl modified nucleoside
  modified_base 12: mod_base = OTHER; note = 2'-fluoro-modified nucleoside
  modified_base 13: mod_base = OTHER; note = 2'-O-methyl modified nucleoside
  modified_base 14: mod_base = OTHER; note = 2'-fluoro-modified nucleoside
  modified_base 15: mod_base = OTHER; note = 2'-O-methyl modified nucleoside
  modified_base 16: mod_base = OTHER; note = 2'-fluoro-modified nucleoside
  modified_base 17: mod_base = OTHER; note = 2'-O-methyl modified nucleoside
  modified_base 18: mod_base = OTHER; note = 2'-fluoro-modified nucleoside
  modified_base 19: mod_base = OTHER; note = 2'-O-methyl modified nucleoside with phosphorothioate linkage
  modified_base 20: mod_base = OTHER; note = 2'-O-methyl modified nucleoside with phosphorothioate linkage
  modified_base 21: mod_base = OTHER; note = 2'-O-methyl modified nucleoside
tgacttgctagcagtgaattt

SEQ ID NO: 13032 - RNA, 21 nt, synthetic construct
  source 1..21: mol_type = other RNA
  modified_base 1: mod_base = OTHER; note = 2'-O-methyl modified nucleoside with phosphorothioate linkage
  modified_base 2: mod_base = OTHER; note = 2'-fluoro-modified nucleoside with phosphorothioate linkage
  modified_base 3: mod_base = OTHER; note = 2'-O-methyl modified nucleoside
  modified_base 4: mod_base = OTHER; note = 2'-O-methyl modified nucleoside
  modified_base 5: mod_base = OTHER; note = 2'-fluoro-modified nucleoside
  modified_base 6: mod_base = OTHER; note = 2'-O-methyl modified nucleoside
  modified_base 7: mod_base = OTHER; note = 2'-fluoro-modified nucleoside
  modified_base 8: mod_base = OTHER; note = 2'-O-methyl modified nucleoside
  modified_base 9: mod_base = OTHER; note = 2'-fluoro-modified nucleoside
  modified_base 10: mod_base = OTHER; note = 2'-O-methyl modified nucleoside
  modified_base 11: mod_base = OTHER; note = 2'-O-methyl modified nucleoside
  modified_base 12: mod_base = OTHER; note = 2'-fluoro-modified nucleoside
  modified_base 13: mod_base = OTHER; note = 2'-O-methyl modified nucleoside
  modified_base 14: mod_base = OTHER; note = 2'-fluoro-modified nucleoside
  modified_base 15: mod_base = OTHER; note = 2'-O-methyl modified nucleoside
  modified_base 16: mod_base = OTHER; note = 2'-fluoro-modified nucleoside
  modified_base 17: mod_base = OTHER; note = 2'-O-methyl modified nucleoside
  modified_base 18: mod_base = OTHER; note = 2'-fluoro-modified nucleoside
  modified_base 19: mod_base = OTHER; note = 2'-O-methyl modified nucleoside with phosphorothioate linkage
  modified_base 20: mod_base = OTHER; note = 2'-O-methyl modified nucleoside with phosphorothioate linkage
  modified_base 21: mod_base = OTHER; note = 2'-O-methyl modified nucleoside
tgacttgctagcagtgaattt

SEQ ID NO: 13033 - RNA, 21 nt, synthetic construct
  source 1..21: mol_type = other RNA
  modified_base 1: mod_base = OTHER; note = 2'-O-methyl modified nucleoside with phosphorothioate linkage
  modified_base 2: mod_base = OTHER; note = 2'-fluoro-modified nucleoside with phosphorothioate linkage
  modified_base 3: mod_base = OTHER; note = 2'-O-methyl modified nucleoside
  modified_base 4: mod_base = OTHER; note = 2'-O-methyl modified nucleoside
  modified_base 5: mod_base = OTHER; note = 2'-fluoro-modified nucleoside
  modified_base 6: mod_base = OTHER; note = 2'-O-methyl modified nucleoside
  modified_base 7: mod_base = OTHER; note = 2'-fluoro-modified nucleoside
  modified_base 8: mod_base = OTHER; note = 2'-O-methyl modified nucleoside
  modified_base 9: mod_base = OTHER; note = 2'-fluoro-modified nucleoside
  modified_base 10: mod_base = OTHER; note = 2'-O-methyl modified nucleoside
  modified_base 11: mod_base = OTHER; note = 2'-O-methyl modified nucleoside
  modified_base 12: mod_base = OTHER; note = 2'-O-methyl modified nucleoside
  modified_base 13: mod_base = OTHER; note = 2'-O-methyl modified nucleoside
  modified_base 14: mod_base = OTHER; note = 2'-fluoro-modified nucleoside
  modified_base 15: mod_base = OTHER; note = 2'-O-methyl modified nucleoside
  modified_base 16: mod_base = OTHER; note = 2'-fluoro-modified nucleoside
  modified_base 17: mod_base = OTHER; note = 2'-O-methyl modified nucleoside
  modified_base 18: mod_base = OTHER; note = 2'-fluoro-modified nucleoside
  modified_base 19: mod_base = OTHER; note = 2'-O-methyl modified nucleoside with phosphorothioate linkage
  modified_base 20: mod_base = OTHER; note = 2'-O-methyl modified nucleoside with phosphorothioate linkage
  modified_base 21: mod_base = OTHER; note = 2'-O-methyl modified nucleoside
tgacttgctagcagtgaattt

SEQ ID NO: 13034 - RNA, 21 nt, synthetic construct
  source 1..21: mol_type = other RNA
  modified_base 1: mod_base = OTHER; note = 2'-O-methyl modified nucleoside with phosphorothioate linkage
  modified_base 2: mod_base = OTHER; note = 2'-fluoro-modified nucleoside with phosphorothioate linkage
  modified_base 3: mod_base = OTHER; note = 2'-O-methyl modified nucleoside
  modified_base 4: mod_base = OTHER; note = 2'-fluoro-modified nucleoside
  modified_base 5: mod_base = OTHER; note = 2'-O-methyl modified nucleoside
  modified_base 6: mod_base = OTHER; note = 2'-fluoro-modified nucleoside
  modified_base 7: mod_base = OTHER; note = 2'-O-methyl modified nucleoside
  modified_base 8: mod_base = OTHER; note = 2'-fluoro-modified nucleoside
  modified_base 9: mod_base = OTHER; note = 2'-O-methyl modified nucleoside
  modified_base 10: mod_base = OTHER; note = 2'-fluoro-modified nucleoside
  modified_base 11: mod_base = OTHER; note = 2'-O-methyl modified nucleoside
  modified_base 12: mod_base = OTHER; note = 2'-fluoro-modified nucleoside
  modified_base 13: mod_base = OTHER; note = 2'-O-methyl modified nucleoside
  modified_base 14: mod_base = OTHER; note = 2'-fluoro-modified nucleoside
  modified_base 15: mod_base = OTHER; note = 2'-O-methyl modified nucleoside
  modified_base 16: mod_base = OTHER; note = 2'-fluoro-modified nucleoside
  modified_base 17: mod_base = OTHER; note = 2'-O-methyl modified nucleoside
  modified_base 18: mod_base = OTHER; note = 2'-fluoro-modified nucleoside
  modified_base 19: mod_base = OTHER; note = 2'-O-methyl modified nucleoside with phosphorothioate linkage
  modified_base 20: mod_base = OTHER; note = 2'-O-methyl modified nucleoside with phosphorothioate linkage
  modified_base 21: mod_base = OTHER; note = 2'-O-methyl modified nucleoside
tcaactatatgcccatggatt

SEQ ID NO: 13035 - RNA, 21 nt, synthetic construct
  source 1..21: mol_type = other RNA
  modified_base 1: mod_base = OTHER; note = 2'-O-methyl modified nucleoside with phosphorothioate linkage
  modified_base 2: mod_base = OTHER; note = 2'-fluoro-modified nucleoside with phosphorothioate linkage
  modified_base 3: mod_base = OTHER; note = 2'-O-methyl modified nucleoside
  modified_base 4: mod_base = OTHER; note = 2'-O-methyl modified nucleoside
  modified_base 5: mod_base = OTHER; note = 2'-O-methyl modified nucleoside
  modified_base 6: mod_base = OTHER; note = 2'-fluoro-modified nucleoside
  modified_base 7: mod_base = OTHER; note = 2'-O-methyl modified nucleoside
  modified_base 8: mod_base = OTHER; note = 2'-fluoro-modified nucleoside
  modified_base 9: mod_base = OTHER; note = 2'-O-methyl modified nucleoside
  modified_base 10: mod_base = OTHER; note = 2'-fluoro-modified nucleoside
  modified_base 11: mod_base = OTHER; note = 2'-O-methyl modified nucleoside
  modified_base 12: mod_base = OTHER; note = 2'-fluoro-modified nucleoside
  modified_base 13: mod_base = OTHER; note = 2'-O-methyl modified nucleoside
  modified_base 14: mod_base = OTHER; note = 2'-fluoro-modified nucleoside
  modified_base 15: mod_base = OTHER; note = 2'-O-methyl modified nucleoside
  modified_base 16: mod_base = OTHER; note = 2'-fluoro-modified nucleoside
  modified_base 17: mod_base = OTHER; note = 2'-O-methyl modified nucleoside
  modified_base 18: mod_base = OTHER; note = 2'-fluoro-modified nucleoside
  modified_base 19: mod_base = OTHER; note = 2'-O-methyl modified nucleoside with phosphorothioate linkage
  modified_base 20: mod_base = OTHER; note = 2'-O-methyl modified nucleoside with phosphorothioate linkage
  modified_base 21: mod_base = OTHER; note = 2'-O-methyl modified nucleoside
tcaactatatgcccatggatt

SEQ ID NO: 13036 - RNA, 21 nt, synthetic construct
  source 1..21: mol_type = other RNA
  modified_base 1: mod_base = OTHER; note = 2'-O-methyl modified nucleoside with phosphorothioate linkage
  modified_base 2: mod_base = OTHER; note = 2'-fluoro-modified nucleoside with phosphorothioate linkage
  modified_base 3: mod_base = OTHER; note = 2'-O-methyl modified nucleoside
  modified_base 4: mod_base = OTHER; note = 2'-O-methyl modified nucleoside
  modified_base 5: mod_base = OTHER; note = 2'-O-methyl modified nucleoside
  modified_base 6: mod_base = OTHER; note = 2'-fluoro-modified nucleoside
  modified_base 7: mod_base = OTHER; note = 2'-O-methyl modified nucleoside
  modified_base 8: mod_base = OTHER; note = 2'-fluoro-modified nucleoside
  modified_base 9: mod_base = OTHER; note = 2'-O-methyl modified nucleoside
  modified_base 10: mod_base = OTHER; note = 2'-fluoro-modified nucleoside
  modified_base 11: mod_base = OTHER; note = 2'-O-methyl modified nucleoside
  modified_base 12: mod_base = OTHER; note = 2'-O-methyl modified nucleoside
  modified_base 13: mod_base = OTHER; note = 2'-O-methyl modified nucleoside
  modified_base 14: mod_base = OTHER; note = 2'-fluoro-modified nucleoside
  modified_base 15: mod_base = OTHER; note = 2'-O-methyl modified nucleoside
  modified_base 16: mod_base = OTHER; note = 2'-fluoro-modified nucleoside
  modified_base 17: mod_base = OTHER; note = 2'-O-methyl modified nucleoside
  modified_base 18: mod_base = OTHER; note = 2'-fluoro-modified nucleoside
  modified_base 19: mod_base = OTHER; note = 2'-O-methyl modified nucleoside with phosphorothioate linkage
  modified_base 20: mod_base = OTHER; note = 2'-O-methyl modified nucleoside with phosphorothioate linkage
  modified_base 21: mod_base = OTHER; note = 2'-O-methyl modified nucleoside
tcaactatatgcccatggatt

SEQ ID NO: 13037 - RNA, 21 nt, synthetic construct
  source 1..21: mol_type = other RNA
  modified_base 1: mod_base = OTHER; note = 2'-O-methyl modified nucleoside with phosphorothioate linkage
  modified_base 2: mod_base = OTHER; note = 2'-fluoro-modified nucleoside with phosphorothioate linkage
  modified_base 3: mod_base = OTHER; note = 2'-O-methyl modified nucleoside
  modified_base 4: mod_base = OTHER; note = 2'-fluoro-modified nucleoside
  modified_base 5: mod_base = OTHER; note = 2'-O-methyl modified nucleoside
  modified_base 6: mod_base = OTHER; note = 2'-fluoro-modified nucleoside
  modified_base 7: mod_base = OTHER; note = 2'-O-methyl modified nucleoside
  modified_base 8: mod_base = OTHER; note = 2'-fluoro-modified nucleoside
  modified_base 9: mod_base = OTHER; note = 2'-O-methyl modified nucleoside
  modified_base 10: mod_base = OTHER; note = 2'-fluoro-modified nucleoside
  modified_base 11: mod_base = OTHER; note = 2'-O-methyl modified nucleoside
  modified_base 12: mod_base = OTHER; note = 2'-O-methyl modified nucleoside
  modified_base 13: mod_base = OTHER; note = 2'-O-methyl modified nucleoside
  modified_base 14: mod_base = OTHER; note = 2'-fluoro-modified nucleoside
  modified_base 15: mod_base = OTHER; note = 2'-O-methyl modified nucleoside
  modified_base 16: mod_base = OTHER; note = 2'-fluoro-modified nucleoside
  modified_base 17: mod_base = OTHER; note = 2'-O-methyl modified nucleoside
  modified_base 18: mod_base = OTHER; note = 2'-fluoro-modified nucleoside
  modified_base 19: mod_base = OTHER; note = 2'-O-methyl modified nucleoside with phosphorothioate linkage
  modified_base 20: mod_base = OTHER; note = 2'-O-methyl modified nucleoside with phosphorothioate linkage
  modified_base 21: mod_base = OTHER; note = 2'-O-methyl modified nucleoside
tcaactatatgcccatggatt

SEQ ID NO: 13038 - RNA, 21 nt, synthetic construct
  source 1..21: mol_type = other RNA
  modified_base 1: mod_base = OTHER; note = 2'-O-methyl modified nucleoside with phosphorothioate linkage
  modified_base 2: mod_base = OTHER; note = 2'-fluoro-modified nucleoside with phosphorothioate linkage
  modified_base 3: mod_base = OTHER; note = 2'-O-methyl modified nucleoside
  modified_base 4: mod_base = OTHER; note = 2'-fluoro-modified nucleoside
  modified_base 5: mod_base = OTHER; note = 2'-O-methyl modified nucleoside
  modified_base 6: mod_base = OTHER; note = 2'-O-methyl modified nucleoside
  modified_base 7: mod_base = OTHER; note = 2'-fluoro-modified nucleoside
  modified_base 8: mod_base = OTHER; note = 2'-O-methyl modified nucleoside
  modified_base 9: mod_base = OTHER; note = 2'-O-methyl modified nucleoside
  modified_base 10: mod_base = OTHER; note = 2'-fluoro-modified nucleoside
  modified_base 11: mod_base = OTHER; note = 2'-O-methyl modified nucleoside
  modified_base 12: mod_base = OTHER; note = 2'-fluoro-modified nucleoside
  modified_base 13: mod_base = OTHER; note = 2'-O-methyl modified nucleoside
  modified_base 14: mod_base = OTHER; note = 2'-fluoro-modified nucleoside
  modified_base 15: mod_base = OTHER; note = 2'-O-methyl modified nucleoside
  modified_base 16: mod_base = OTHER; note = 2'-fluoro-modified nucleoside
  modified_base 17: mod_base = OTHER; note = 2'-O-methyl modified nucleoside
  modified_base 18: mod_base = OTHER; note = 2'-fluoro-modified nucleoside
  modified_base 19: mod_base = OTHER; note = 2'-O-methyl modified nucleoside with phosphorothioate linkage
  modified_base 20: mod_base = OTHER; note = 2'-O-methyl modified nucleoside with phosphorothioate linkage
  modified_base 21: mod_base = OTHER; note = 2'-O-methyl modified nucleoside
tcaactatatgcccatggatt

SEQ ID NO: 13039 - RNA, 21 nt, synthetic construct
  source 1..21: mol_type = other RNA
  modified_base 1: mod_base = OTHER; note = 2'-O-methyl modified nucleoside with phosphorothioate linkage
  modified_base 2: mod_base = OTHER; note = 2'-fluoro-modified nucleoside with phosphorothioate linkage
  modified_base 3: mod_base = OTHER; note = 2'-O-methyl modified nucleoside
  modified_base 4: mod_base = OTHER; note = 2'-fluoro-modified nucleoside
  modified_base 5: mod_base = OTHER; note = 2'-O-methyl modified nucleoside
  modified_base 6: mod_base = OTHER; note = 2'-O-methyl modified nucleoside
  modified_base 7: mod_base = OTHER; note = 2'-fluoro-modified nucleoside
  modified_base 8: mod_base = OTHER; note = 2'-O-methyl modified nucleoside
  modified_base 9: mod_base = OTHER; note = 2'-O-methyl modified nucleoside
  modified_base 10: mod_base = OTHER; note = 2'-fluoro-modified nucleoside
  modified_base 11: mod_base = OTHER; note = 2'-O-methyl modified nucleoside
  modified_base 12: mod_base = OTHER; note = 2'-O-methyl modified nucleoside
  modified_base 13: mod_base = OTHER; note = 2'-O-methyl modified nucleoside
  modified_base 14: mod_base = OTHER; note = 2'-fluoro-modified nucleoside
  modified_base 15: mod_base = OTHER; note = 2'-O-methyl modified nucleoside
  modified_base 16: mod_base = OTHER; note = 2'-fluoro-modified nucleoside
  modified_base 17: mod_base = OTHER; note = 2'-O-methyl modified nucleoside
  modified_base 18: mod_base = OTHER; note = 2'-fluoro-modified nucleoside
  modified_base 19: mod_base = OTHER; note = 2'-O-methyl modified nucleoside with phosphorothioate linkage
  modified_base 20: mod_base = OTHER; note = 2'-O-methyl modified nucleoside with phosphorothioate linkage
  modified_base 21: mod_base = OTHER; note = 2'-O-methyl modified nucleoside
tcaactatatgcccatggatt

SEQ ID NO: 13040 - RNA, 21 nt, synthetic construct
  source 1..21: mol_type = other RNA
  modified_base 1: mod_base = OTHER; note = 2'-O-methyl modified nucleoside with phosphorothioate linkage
  modified_base 2: mod_base = OTHER; note = 2'-fluoro-modified nucleoside with phosphorothioate linkage
  modified_base 3: mod_base = OTHER; note = 2'-O-methyl modified nucleoside
  modified_base 4: mod_base = OTHER; note = 2'-O-methyl modified nucleoside
  modified_base 5: mod_base = OTHER; note = 2'-fluoro-modified nucleoside
  modified_base 6: mod_base = OTHER; note = 2'-O-methyl modified nucleoside
  modified_base 7: mod_base = OTHER; note = 2'-fluoro-modified nucleoside
  modified_base 8: mod_base = OTHER; note = 2'-O-methyl modified nucleoside
  modified_base 9: mod_base = OTHER; note = 2'-fluoro-modified nucleoside
  modified_base 10: mod_base = OTHER; note = 2'-O-methyl modified nucleoside
  modified_base 11: mod_base = OTHER; note = 2'-fluoro-modified nucleoside
  modified_base 12: mod_base = OTHER; note = 2'-O-methyl modified nucleoside
  modified_base 13: mod_base = OTHER; note = 2'-O-methyl modified nucleoside
  modified_base 14: mod_base = OTHER; note = 2'-fluoro-modified nucleoside
  modified_base 15: mod_base = OTHER; note = 2'-O-methyl modified nucleoside
  modified_base 16: mod_base = OTHER; note = 2'-fluoro-modified nucleoside
  modified_base 17: mod_base = OTHER; note = 2'-O-methyl modified nucleoside
  modified_base 18: mod_base = OTHER; note = 2'-fluoro-modified nucleoside
  modified_base 19: mod_base = OTHER; note = 2'-O-methyl modified nucleoside with phosphorothioate linkage
  modified_base 20: mod_base = OTHER; note = 2'-O-methyl modified nucleoside with phosphorothioate linkage
  modified_base 21: mod_base = OTHER; note = 2'-O-methyl modified nucleoside
tcaactatatgcccatggatt

SEQ ID NO: 13041 - RNA, 21 nt, synthetic construct
  source 1..21: mol_type = other RNA
  modified_base 1: mod_base = OTHER; note = 2'-O-methyl modified nucleoside with phosphorothioate linkage
  modified_base 2: mod_base = OTHER; note = 2'-fluoro-modified nucleoside with phosphorothioate linkage
  modified_base 3: mod_base = OTHER; note = 2'-O-methyl modified nucleoside
  modified_base 4: mod_base = OTHER; note = 2'-fluoro-modified nucleoside
  modified_base 5: mod_base = OTHER; note = 2'-O-methyl modified nucleoside
  modified_base 6: mod_base = OTHER; note = 2'-fluoro-modified nucleoside
  modified_base 7: mod_base = OTHER; note = 2'-O-methyl modified nucleoside
  modified_base 8: mod_base = OTHER; note = 2'-fluoro-modified nucleoside
  modified_base 9: mod_base = OTHER; note = 2'-O-methyl modified nucleoside
  modified_base 10: mod_base = OTHER; note = 2'-fluoro-modified nucleoside
  modified_base 11: mod_base = OTHER; note = 2'-O-methyl modified nucleoside
  modified_base 12: mod_base = OTHER; note = 2'-fluoro-modified nucleoside
  modified_base 13: mod_base = OTHER; note = 2'-O-methyl modified nucleoside
  modified_base 14: mod_base = OTHER; note = 2'-fluoro-modified nucleoside
  modified_base 15: mod_base = OTHER; note = 2'-O-methyl modified nucleoside
  modified_base 16: mod_base = OTHER; note = 2'-fluoro-modified nucleoside
  modified_base 17: mod_base = OTHER; note = 2'-O-methyl modified nucleoside
  modified_base 18: mod_base = OTHER; note = 2'-O-methyl modified nucleoside
  modified_base 19: mod_base = OTHER; note = 2'-O-methyl modified nucleoside with phosphorothioate linkage
  modified_base 20: mod_base = OTHER; note = 2'-O-methyl modified nucleoside with phosphorothioate linkage
  modified_base 21: mod_base = OTHER; note = 2'-O-methyl modified nucleoside
tcaactatatgcccatggatt

SEQ ID NO: 13042 - RNA, 21 nt, synthetic construct
  source 1..21: mol_type = other RNA
  modified_base 1: mod_base = OTHER; note = 2'-O-methyl modified nucleoside with phosphorothioate linkage
  modified_base 2: mod_base = OTHER; note = 2'-fluoro-modified nucleoside with phosphorothioate linkage
  modified_base 3: mod_base = OTHER; note = 2'-O-methyl modified nucleoside
  modified_base 4: mod_base = OTHER; note = 2'-O-methyl modified nucleoside
  modified_base 5: mod_base = OTHER; note = 2'-O-methyl modified nucleoside
  modified_base 6: mod_base = OTHER; note = 2'-fluoro-modified nucleoside
  modified_base 7: mod_base = OTHER; note = 2'-O-methyl modified nucleoside
  modified_base 8: mod_base = OTHER; note = 2'-fluoro-modified nucleoside
  modified_base 9: mod_base = OTHER; note = 2'-O-methyl modified nucleoside
  modified_base 10: mod_base = OTHER; note = 2'-fluoro-modified nucleoside
  modified_base 11: mod_base = OTHER; note = 2'-O-methyl modified nucleoside
  modified_base 12: mod_base = OTHER; note = 2'-fluoro-modified nucleoside
  modified_base 13: mod_base = OTHER; note = 2'-O-methyl modified nucleoside
  modified_base 14: mod_base = OTHER; note = 2'-fluoro-modified nucleoside
  modified_base 15: mod_base = OTHER; note = 2'-O-methyl modified nucleoside
  modified_base 16: mod_base = OTHER; note = 2'-fluoro-modified nucleoside
  modified_base 17: mod_base = OTHER; note = 2'-O-methyl modified nucleoside
  modified_base 18: mod_base = OTHER; note = 2'-fluoro-modified nucleoside
  modified_base 19: mod_base = OTHER; note = 2'-O-methyl modified nucleoside with phosphorothioate linkage
  modified_base 20: mod_base = OTHER; note = 2'-O-methyl modified nucleoside with phosphorothioate linkage
  modified_base 21: mod_base = OTHER; note = 2'-O-methyl modified nucleoside
tacaaaactcagaatatattt

SEQ ID NO: 13043 - RNA, 21 nt, synthetic construct
  source 1..21: mol_type = other RNA
  modified_base 1: mod_base = OTHER; note = 2'-O-methyl modified nucleoside with phosphorothioate linkage
  modified_base 2: mod_base = OTHER; note = 2'-fluoro-modified nucleoside with phosphorothioate linkage
  modified_base 3: mod_base = OTHER; note = 2'-O-methyl modified nucleoside
  modified_base 4: mod_base = OTHER; note = 2'-O-methyl modified nucleoside
  modified_base 5: mod_base = OTHER; note = 2'-O-methyl modified nucleoside
  modified_base 6: mod_base = OTHER; note = 2'-fluoro-modified nucleoside
  modified_base 7: mod_base = OTHER; note = 2'-O-methyl modified nucleoside
  modified_base 8: mod_base = OTHER; note = 2'-fluoro-modified nucleoside
  modified_base 9: mod_base = OTHER; note = 2'-O-methyl modified nucleoside
  modified_base 10: mod_base = OTHER; note = 2'-fluoro-modified nucleoside
  modified_base 11: mod_base = OTHER; note = 2'-O-methyl modified nucleoside
  modified_base 12: mod_base = OTHER; note = 2'-O-methyl modified nucleoside
  modified_base 13: mod_base = OTHER; note = 2'-O-methyl modified nucleoside
  modified_base 14: mod_base = OTHER; note = 2'-fluoro-modified nucleoside
  modified_base 15: mod_base = OTHER; note = 2'-O-methyl modified nucleoside
  modified_base 16: mod_base = OTHER; note = 2'-fluoro-modified nucleoside
  modified_base 17: mod_base = OTHER; note = 2'-O-methyl modified nucleoside
  modified_base 18: mod_base = OTHER; note = 2'-fluoro-modified nucleoside
  modified_base 19: mod_base = OTHER; note = 2'-O-methyl modified nucleoside with phosphorothioate linkage
  modified_base 20: mod_base = OTHER; note = 2'-O-methyl modified nucleoside with phosphorothioate linkage
  modified_base 21: mod_base = OTHER; note = 2'-O-methyl modified nucleoside
tacaaaactcagaatatattt

SEQ ID NO: 13044 - RNA, 21 nt, synthetic construct
  source 1..21: mol_type = other RNA
  modified_base 1: mod_base = OTHER; note = 2'-O-methyl modified nucleoside with phosphorothioate linkage
  modified_base 2: mod_base = OTHER; note = 2'-fluoro-modified nucleoside with phosphorothioate linkage
  modified_base 3: mod_base = OTHER; note = 2'-O-methyl modified nucleoside
  modified_base 4: mod_base = OTHER; note = 2'-fluoro-modified nucleoside
  modified_base 5: mod_base = OTHER; note = 2'-O-methyl modified nucleoside
  modified_base 6: mod_base = OTHER; note = 2'-fluoro-modified nucleoside
  modified_base 7: mod_base = OTHER; note = 2'-O-methyl modified nucleoside
  modified_base 8: mod_base = OTHER; note = 2'-fluoro-modified nucleoside
  modified_base 9: mod_base = OTHER; note = 2'-O-methyl modified nucleoside
  modified_base 10: mod_base = OTHER; note = 2'-fluoro-modified nucleoside
  modified_base 11: mod_base = OTHER; note = 2'-O-methyl modified nucleoside
  modified_base 12: mod_base = OTHER; note = 2'-O-methyl modified nucleoside
  modified_base 13: mod_base = OTHER; note = 2'-O-methyl modified nucleoside
  modified_base 14: mod_base = OTHER; note = 2'-fluoro-modified nucleoside
  modified_base 15: mod_base = OTHER; note = 2'-O-methyl modified nucleoside
  modified_base 16: mod_base = OTHER; note = 2'-fluoro-modified nucleoside
  modified_base 17: mod_base = OTHER; note = 2'-O-methyl modified nucleoside
  modified_base 18: mod_base = OTHER; note = 2'-fluoro-modified nucleoside
  modified_base 19: mod_base = OTHER; note = 2'-O-methyl modified nucleoside with phosphorothioate linkage
  modified_base 20: mod_base = OTHER; note = 2'-O-methyl modified nucleoside with phosphorothioate linkage
  modified_base 21: mod_base = OTHER; note = 2'-O-methyl modified nucleoside
tacaaaactcagaatatattt

SEQ ID NO: 13045 - RNA, 21 nt, synthetic construct
  source 1..21: mol_type = other RNA
  modified_base 1: mod_base = OTHER; note = 2'-O-methyl modified nucleoside with phosphorothioate linkage
  modified_base 2: mod_base = OTHER; note = 2'-fluoro-modified nucleoside with phosphorothioate linkage
  modified_base 3: mod_base = OTHER; note = 2'-O-methyl modified nucleoside
  modified_base 4: mod_base = OTHER; note = 2'-fluoro-modified nucleoside
  modified_base 5: mod_base = OTHER; note = 2'-O-methyl modified nucleoside
  modified_base 6: mod_base = OTHER; note = 2'-fluoro-modified nucleoside
  modified_base 7: mod_base = OTHER; note = 2'-O-methyl modified nucleoside
  modified_base 8: mod_base = OTHER; note = 2'-fluoro-modified nucleoside
  modified_base 9: mod_base = OTHER; note = 2'-O-methyl modified nucleoside
  modified_base 10: mod_base = OTHER; note = 2'-O-methyl modified nucleoside
  modified_base 11: mod_base = OTHER; note = 2'-O-methyl modified nucleoside
  modified_base 12: mod_base = OTHER; note = 2'-fluoro-modified nucleoside
  modified_base 13: mod_base = OTHER; note = 2'-O-methyl modified nucleoside
  modified_base 14: mod_base = OTHER; note = 2'-fluoro-modified nucleoside
  modified_base 15: mod_base = OTHER; note = 2'-O-methyl modified nucleoside
  modified_base 16: mod_base = OTHER; note = 2'-fluoro-modified nucleoside
  modified_base 17: mod_base = OTHER; note = 2'-O-methyl modified nucleoside
  modified_base 18: mod_base = OTHER; note = 2'-fluoro-modified nucleoside
  modified_base 19: mod_base = OTHER; note = 2'-O-methyl modified nucleoside with phosphorothioate linkage
  modified_base 20: mod_base = OTHER; note = 2'-O-methyl modified nucleoside with phosphorothioate linkage
  modified_base 21: mod_base = OTHER; note = 2'-O-methyl modified nucleoside
tacaaaactcagaatatattt

SEQ ID NO: 13046 - RNA, 21 nt, synthetic construct
  source 1..21: mol_type = other RNA
  modified_base 1: mod_base = OTHER; note = 2'-O-methyl modified nucleoside with phosphorothioate linkage
  modified_base 2: mod_base = OTHER; note = 2'-fluoro-modified nucleoside with phosphorothioate linkage
  modified_base 3: mod_base = OTHER; note = 2'-O-methyl modified nucleoside
  modified_base 4: mod_base = OTHER; note = 2'-fluoro-modified nucleoside
  modified_base 5: mod_base = OTHER; note = 2'-O-methyl modified nucleoside
  modified_base 6: mod_base = OTHER; note = 2'-O-methyl modified nucleoside
  modified_base 7: mod_base = OTHER; note = 2'-fluoro-modified nucleoside
  modified_base 8: mod_base = OTHER; note = 2'-O-methyl modified nucleoside
  modified_base 9: mod_base = OTHER; note = 2'-O-methyl modified nucleoside
  modified_base 10: mod_base = OTHER; note = 2'-O-methyl modified nucleoside
  modified_base 11: mod_base = OTHER; note = 2'-O-methyl modified nucleoside
  modified_base 12: mod_base = OTHER; note = 2'-fluoro-modified nucleoside
  modified_base 13: mod_base = OTHER; note = 2'-O-methyl modified nucleoside
  modified_base 14: mod_base = OTHER; note = 2'-fluoro-modified nucleoside
  modified_base 15: mod_base = OTHER; note = 2'-O-methyl modified nucleoside
  modified_base 16: mod_base = OTHER; note = 2'-fluoro-modified nucleoside
  modified_base 17: mod_base = OTHER; note = 2'-O-methyl modified nucleoside
  modified_base 18: mod_base = OTHER; note = 2'-fluoro-modified nucleoside
  modified_base 19: mod_base = OTHER; note = 2'-O-methyl modified nucleoside with phosphorothioate linkage
  modified_base 20: mod_base = OTHER; note = 2'-O-methyl modified nucleoside with phosphorothioate linkage
  modified_base 21: mod_base = OTHER; note = 2'-O-methyl modified nucleoside
tacaaaactcagaatatattt

SEQ ID NO: 13047 - RNA, 21 nt, synthetic construct
  source 1..21: mol_type = other RNA
  modified_base 1: mod_base = OTHER; note = 2'-O-methyl modified nucleoside with phosphorothioate linkage
  modified_base 2: mod_base = OTHER; note = 2'-fluoro-modified nucleoside with phosphorothioate linkage
  modified_base 3: mod_base = OTHER; note = 2'-O-methyl modified nucleoside
  modified_base 4: mod_base = OTHER; note = 2'-fluoro-modified nucleoside
  modified_base 5: mod_base = OTHER; note = 2'-O-methyl modified nucleoside
  modified_base 6: mod_base = OTHER; note = 2'-O-methyl modified nucleoside
  modified_base 7: mod_base = OTHER; note = 2'-fluoro-modified nucleoside
  modified_base 8: mod_base = OTHER; note = 2'-O-methyl modified nucleoside
  modified_base 9: mod_base = OTHER; note = 2'-fluoro-modified nucleoside
  modified_base 10: mod_base = OTHER; note = 2'-O-methyl modified nucleoside
  modified_base 11: mod_base = OTHER; note = 2'-O-methyl modified nucleoside
  modified_base 12: mod_base = OTHER; note = 2'-fluoro-modified nucleoside
  modified_base 13: mod_base = OTHER; note = 2'-O-methyl modified nucleoside
  modified_base 14: mod_base = OTHER; note = 2'-fluoro-modified nucleoside
  modified_base 15: mod_base = OTHER; note = 2'-O-methyl modified nucleoside
  modified_base 16: mod_base = OTHER; note = 2'-fluoro-modified nucleoside
  modified_base 17: mod_base = OTHER; note = 2'-O-methyl modified nucleoside
  modified_base 18: mod_base = OTHER; note = 2'-fluoro-modified nucleoside
  modified_base 19: mod_base = OTHER; note = 2'-O-methyl modified nucleoside with phosphorothioate linkage
  modified_base 20: mod_base = OTHER; note = 2'-O-methyl modified nucleoside with phosphorothioate linkage
  modified_base 21: mod_base = OTHER; note = 2'-O-methyl modified nucleoside
tacaaaactcagaatatattt

SEQ ID NO: 13048 - RNA, 21 nt, synthetic construct
  source 1..21: mol_type = other RNA
  modified_base 1: mod_base = OTHER; note = 2'-O-methyl modified nucleoside with phosphorothioate linkage
  modified_base 2: mod_base = OTHER; note = 2'-fluoro-modified nucleoside with phosphorothioate linkage
  modified_base 3: mod_base = OTHER; note = 2'-O-methyl modified nucleoside
  modified_base 4: mod_base = OTHER; note = 2'-fluoro-modified nucleoside
  modified_base 5: mod_base = OTHER; note = 2'-O-methyl modified nucleoside
  modified_base 6: mod_base = OTHER; note = 2'-O-methyl modified nucleoside
  modified_base 7: mod_base = OTHER; note = 2'-fluoro-modified nucleoside
  modified_base 8: mod_base = OTHER; note = 2'-O-methyl modified nucleoside
  modified_base 9: mod_base = OTHER; note = 2'-O-methyl modified nucleoside
  modified_base 10: mod_base = OTHER; note = 2'-fluoro-modified nucleoside
  modified_base 11: mod_base = OTHER; note = 2'-O-methyl modified nucleoside
  modified_base 12: mod_base = OTHER; note = 2'-O-methyl modified nucleoside
  modified_base 13: mod_base = OTHER; note = 2'-O-methyl modified nucleoside
  modified_base 14: mod_base = OTHER; note = 2'-fluoro-modified nucleoside
  modified_base 15: mod_base = OTHER; note = 2'-O-methyl modified nucleoside
  modified_base 16: mod_base = OTHER; note = 2'-fluoro-modified nucleoside
  modified_base 17: mod_base = OTHER; note = 2'-O-methyl modified nucleoside
  modified_base 18: mod_base = OTHER; note = 2'-fluoro-modified nucleoside
  modified_base 19: mod_base = OTHER; note = 2'-O-methyl modified nucleoside with phosphorothioate linkage
  modified_base 20: mod_base = OTHER; note = 2'-O-methyl modified nucleoside with phosphorothioate linkage
  modified_base 21: mod_base = OTHER; note = 2'-O-methyl modified nucleoside
tacaaaactcagaatatattt

SEQ ID NO: 13049 - RNA, 21 nt, synthetic construct
  source 1..21: mol_type = other RNA
  modified_base 1: mod_base = OTHER; note = 2'-O-methyl modified nucleoside with phosphorothioate linkage
  modified_base 2: mod_base = OTHER; note = 2'-fluoro-modified nucleoside with phosphorothioate linkage
  modified_base 3: mod_base = OTHER; note = 2'-O-methyl modified nucleoside
  modified_base 4: mod_base = OTHER; note = 2'-O-methyl modified nucleoside
  modified_base 5: mod_base = OTHER; note = 2'-fluoro-modified nucleoside
  modified_base 6: mod_base = OTHER; note = 2'-O-methyl modified nucleoside
  modified_base 7: mod_base = OTHER; note = 2'-fluoro-modified nucleoside
  modified_base 8: mod_base = OTHER; note = 2'-O-methyl modified nucleoside
  modified_base 9: mod_base = OTHER; note = 2'-O-methyl modified nucleoside
  modified_base 10: mod_base = OTHER; note = 2'-fluoro-modified nucleoside
  modified_base 11: mod_base = OTHER; note = 2'-O-methyl modified nucleoside
  modified_base 12: mod_base = OTHER; note = 2'-O-methyl modified nucleoside
  modified_base 13: mod_base = OTHER; note = 2'-O-methyl modified nucleoside
  modified_base 14: mod_base = OTHER; note = 2'-fluoro-modified nucleoside
  modified_base 15: mod_base = OTHER; note = 2'-O-methyl modified nucleoside
  modified_base 16: mod_base = OTHER; note = 2'-fluoro-modified nucleoside
  modified_base 17: mod_base = OTHER; note = 2'-O-methyl modified nucleoside
  modified_base 18: mod_base = OTHER; note = 2'-fluoro-modified nucleoside
  modified_base 19: mod_base = OTHER; note = 2'-O-methyl modified nucleoside with phosphorothioate linkage
  modified_base 20: mod_base = OTHER; note = 2'-O-methyl modified nucleoside with phosphorothioate linkage
  modified_base 21: mod_base = OTHER; note = 2'-O-methyl modified nucleoside
tacaaaactcagaatatattt

SEQ ID NO: 13050 - RNA, 21 nt, synthetic construct
  source 1..21: mol_type = other RNA
  modified_base 1: mod_base = OTHER; note = 2'-O-methyl modified nucleoside with phosphorothioate linkage
  modified_base 2: mod_base = OTHER; note = 2'-fluoro-modified nucleoside with phosphorothioate linkage
  modified_base 3: mod_base = OTHER; note = 2'-O-methyl modified nucleoside
  modified_base 4: mod_base = OTHER; note = 2'-O-methyl modified nucleoside
  modified_base 5: mod_base = OTHER; note = 2'-O-methyl modified nucleoside
  modified_base 6: mod_base = OTHER; note = 2'-fluoro-modified nucleoside
  modified_base 7: mod_base = OTHER; note = 2'-O-methyl modified nucleoside
  modified_base 8: mod_base = OTHER; note = 2'-fluoro-modified nucleoside
  modified_base 9: mod_base = OTHER; note = 2'-O-methyl modified nucleoside
  modified_base 10: mod_base = OTHER; note = 2'-fluoro-modified nucleoside
  modified_base 11: mod_base = OTHER; note = 2'-O-methyl modified nucleoside
  modified_base 12: mod_base = OTHER; note = 2'-fluoro-modified nucleoside
  modified_base 13: mod_base = OTHER; note = 2'-O-methyl modified nucleoside
  modified_base 14: mod_base = OTHER; note = 2'-fluoro-modified nucleoside
  modified_base 15: mod_base = OTHER; note = 2'-O-methyl modified nucleoside
  modified_base 16: mod_base = OTHER; note = 2'-fluoro-modified nucleoside
  modified_base 17: mod_base = OTHER; note = 2'-O-methyl modified nucleoside
  modified_base 18: mod_base = OTHER; note = 2'-fluoro-modified nucleoside
  modified_base 19: mod_base = OTHER; note = 2'-O-methyl modified nucleoside with phosphorothioate linkage
  modified_base 20: mod_base = OTHER; note = 2'-O-methyl modified nucleoside with phosphorothioate linkage
  modified_base 21: mod_base = OTHER; note = 2'-O-methyl modified nucleoside
tgacttgctagcagtgaattt

SEQ ID NO: 13051 - RNA, 21 nt, synthetic construct
  source 1..21: mol_type = other RNA
  modified_base 1: mod_base = OTHER; note = 2'-O-methyl modified nucleoside with phosphorothioate linkage
  modified_base 2: mod_base = OTHER; note = 2'-fluoro-modified nucleoside with phosphorothioate linkage
  modified_base 3: mod_base = OTHER; note = 2'-O-methyl modified nucleoside
  modified_base 4: mod_base = OTHER; note = 2'-O-methyl modified nucleoside
  modified_base 5: mod_base = OTHER; note = 2'-O-methyl modified nucleoside
  modified_base 6: mod_base = OTHER; note = 2'-fluoro-modified nucleoside
  modified_base 7: mod_base = OTHER; note = 2'-O-methyl modified nucleoside
  modified_base 8: mod_base = OTHER; note = 2'-fluoro-modified nucleoside
  modified_base 9: mod_base = OTHER; note = 2'-O-methyl modified nucleoside
  modified_base 10: mod_base = OTHER; note = 2'-fluoro-modified nucleoside
  modified_base 11: mod_base = OTHER; note = 2'-O-methyl modified nucleoside
  modified_base 12: mod_base = OTHER; note = 2'-fluoro-modified nucleoside
  modified_base 13: mod_base = OTHER; note = 2'-O-methyl modified nucleoside
  modified_base 14: mod_base = OTHER; note = 2'-fluoro-modified nucleoside
  modified_base 15: mod_base = OTHER; note = 2'-O-methyl modified nucleoside
  modified_base 16: mod_base = OTHER; note = 2'-fluoro-modified nucleoside
  modified_base 17: mod_base = OTHER; note = 2'-O-methyl modified nucleoside
  modified_base 18: mod_base = OTHER; note = 2'-fluoro-modified nucleoside
  modified_base 19: mod_base = OTHER; note = 2'-O-methyl modified nucleoside with phosphorothioate linkage
  modified_base 20: mod_base = OTHER; note = 2'-O-methyl modified nucleoside with phosphorothioate linkage
  modified_base 21: mod_base = OTHER; note = 2'-O-methyl modified nucleoside
tgacttgctagcagtgaattt

SEQ ID NO: 13052 - RNA, 21 nt, synthetic construct
  source 1..21: mol_type = other RNA
  modified_base 1: mod_base = OTHER; note = 2'-O-methyl modified nucleoside with phosphorothioate linkage
  modified_base 2: mod_base = OTHER; note = 2'-fluoro-modified nucleoside with phosphorothioate linkage
  modified_base 3: mod_base = OTHER; note = 2'-O-methyl modified nucleoside
  modified_base 4: mod_base = OTHER; note = 2'-O-methyl modified nucleoside
  modified_base 5: mod_base = OTHER; note = 2'-fluoro-modified nucleoside
  modified_base 6: mod_base = OTHER; note = 2'-O-methyl modified nucleoside
  modified_base 7: mod_base = OTHER; note = 2'-fluoro-modified nucleoside
  modified_base 8: mod_base = OTHER; note = 2'-O-methyl modified nucleoside
  modified_base 9: mod_base = OTHER; note = 2'-fluoro-modified nucleoside
  modified_base 10: mod_base = OTHER; note = 2'-O-methyl modified nucleoside
  modified_base 11: mod_base = OTHER; note = 2'-O-methyl modified nucleoside
  modified_base 12: mod_base = OTHER; note = 2'-O-methyl modified nucleoside
  modified_base 13: mod_base = OTHER; note = 2'-O-methyl modified nucleoside
  modified_base 14: mod_base = OTHER; note = 2'-fluoro-modified nucleoside
  modified_base 15: mod_base = OTHER; note = 2'-O-methyl modified nucleoside
  modified_base 16: mod_base = OTHER; note = 2'-fluoro-modified nucleoside
  modified_base 17: mod_base = OTHER; note = 2'-O-methyl modified nucleoside
  modified_base 18: mod_base = OTHER; note = 2'-fluoro-modified nucleoside
  modified_base 19: mod_base = OTHER; note = 2'-O-methyl modified nucleoside with phosphorothioate linkage
  modified_base 20: mod_base = OTHER; note = 2'-O-methyl modified nucleoside with phosphorothioate linkage
  modified_base 21: mod_base = OTHER; note = 2'-O-methyl modified nucleoside
tgacttgctagcagtgaattt

SEQ ID NO: 13053 - RNA, 21 nt, synthetic construct
  source 1..21: mol_type = other RNA
  modified_base 1: mod_base = OTHER; note = 2'-O-methyl modified nucleoside with phosphorothioate linkage
  modified_base 2: mod_base = OTHER; note = 2'-fluoro-modified nucleoside with phosphorothioate linkage
  modified_base 3: mod_base = OTHER; note = 2'-O-methyl modified nucleoside
  modified_base 4: mod_base = OTHER; note = 2'-O-methyl modified nucleoside
  modified_base 5: mod_base = OTHER; note = 2'-fluoro-modified nucleoside
  modified_base 6: mod_base = OTHER; note = 2'-O-methyl modified nucleoside
  modified_base 7: mod_base = OTHER; note = 2'-fluoro-modified nucleoside
  modified_base 8: mod_base = OTHER; note = 2'-O-methyl modified nucleoside
  modified_base 9: mod_base = OTHER; note = 2'-fluoro-modified nucleoside
  modified_base 10: mod_base = OTHER; note = 2'-O-methyl modified nucleoside
  modified_base 11: mod_base = OTHER; note = 2'-O-methyl modified nucleoside
  modified_base 12: mod_base = OTHER; note = 2'-O-methyl modified nucleoside
  modified_base 13: mod_base = OTHER; note = 2'-O-methyl modified nucleoside
  modified_base 14: mod_base = OTHER; note = 2'-fluoro-modified nucleoside
  modified_base 15: mod_base = OTHER; note = 2'-O-methyl modified nucleoside
  modified_base 16: mod_base = OTHER; note = 2'-fluoro-modified nucleoside
  modified_base 17: mod_base = OTHER; note = 2'-O-methyl modified nucleoside
  modified_base 18: mod_base = OTHER; note = 2'-fluoro-modified nucleoside
  modified_base 19: mod_base = OTHER; note = 2'-O-methyl modified nucleoside with phosphorothioate linkage
  modified_base 20: mod_base = OTHER; note = 2'-O-methyl modified nucleoside with phosphorothioate linkage
  modified_base 21: mod_base = OTHER; note = 2'-O-methyl modified nucleoside
tgacttgctagcagtgaattt

SEQ ID NO: 13054 - RNA, 21 nt, synthetic construct
  source 1..21: mol_type = other RNA
  modified_base 1: mod_base = OTHER; note = 2'-O-methyl modified nucleoside with phosphorothioate linkage
  modified_base 2: mod_base = OTHER; note = 2'-fluoro-modified nucleoside with phosphorothioate linkage
  modified_base 3: mod_base = OTHER; note = 2'-O-methyl modified nucleoside
  modified_base 4: mod_base = OTHER; note = 2'-fluoro-modified nucleoside
  modified_base 5: mod_base = OTHER; note = 2'-O-methyl modified nucleoside
  modified_base 6: mod_base = OTHER; note = 2'-O-methyl modified nucleoside
  modified_base 7: mod_base = OTHER; note = 2'-fluoro-modified nucleoside
  modified_base 8: mod_base = OTHER; note = 2'-O-methyl modified nucleoside
  modified_base 9: mod_base = OTHER; note = 2'-fluoro-modified nucleoside
  modified_base 10: mod_base = OTHER; note = 2'-O-methyl modified nucleoside
  modified_base 11: mod_base = OTHER; note = 2'-O-methyl modified nucleoside
  modified_base 12: mod_base = OTHER; note = 2'-O-methyl modified nucleoside
  modified_base 13: mod_base = OTHER; note = 2'-O-methyl modified nucleoside
  modified_base 14: mod_base = OTHER; note = 2'-fluoro-modified nucleoside
  modified_base 15: mod_base = OTHER; note = 2'-O-methyl modified nucleoside
  modified_base 16: mod_base = OTHER; note = 2'-fluoro-modified nucleoside
  modified_base 17: mod_base = OTHER; note = 2'-O-methyl modified nucleoside
  modified_base 18: mod_base = OTHER; note = 2'-fluoro-modified nucleoside
  modified_base 19: mod_base = OTHER; note = 2'-O-methyl modified nucleoside with phosphorothioate linkage
  modified_base 20: mod_base = OTHER; note = 2'-O-methyl modified nucleoside with phosphorothioate linkage
  modified_base 21: mod_base = OTHER; note = 2'-O-methyl modified nucleoside
tcgatcataggagattccatt

SEQ ID NO: 13055 - RNA, 21 nt, synthetic construct
  source 1..21: mol_type = other RNA
  modified_base 1: mod_base = OTHER; note = 2'-O-methyl modified nucleoside with phosphorothioate linkage
  modified_base 2: mod_base = OTHER; note = 2'-fluoro-modified nucleoside with phosphorothioate linkage
  modified_base 3: mod_base = OTHER; note = 2'-O-methyl modified nucleoside
  modified_base 4: mod_base = OTHER; note = 2'-fluoro-modified nucleoside
  modified_base 5: mod_base = OTHER; note = 2'-O-methyl modified nucleoside
  modified_base 6: mod_base = OTHER; note = 2'-O-methyl modified nucleoside
  modified_base 7: mod_base = OTHER; note = 2'-fluoro-modified nucleoside
  modified_base 8: mod_base = OTHER; note = 2'-O-methyl modified nucleoside
  modified_base 9: mod_base = OTHER; note = 2'-fluoro-modified nucleoside
  modified_base 10: mod_base = OTHER; note = 2'-O-methyl modified nucleoside
  modified_base 11: mod_base = OTHER; note = 2'-O-methyl modified nucleoside
  modified_base 12: mod_base = OTHER; note = 2'-O-methyl modified nucleoside
  modified_base 13: mod_base = OTHER; note = 2'-O-methyl modified nucleoside
  modified_base 14: mod_base = OTHER; note = 2'-fluoro-modified nucleoside
  modified_base 15: mod_base = OTHER; note = 2'-O-methyl modified nucleoside
  modified_base 16: mod_base = OTHER; note = 2'-fluoro-modified nucleoside
  modified_base 17: mod_base = OTHER; note = 2'-O-methyl modified nucleoside
  modified_base 18: mod_base = OTHER; note = 2'-fluoro-modified nucleoside
  modified_base 19: mod_base = OTHER; note = 2'-O-methyl modified nucleoside with phosphorothioate linkage
  modified_base 20: mod_base = OTHER; note = 2'-O-methyl modified nucleoside with phosphorothioate linkage
  modified_base 21: mod_base = OTHER; note = 2'-O-methyl modified nucleoside
tcgatcataggagattccatt

SEQ ID NO: 13056 - RNA, 21 nt, synthetic construct
  source 1..21: mol_type = other RNA
  modified_base 1: mod_base = OTHER; note = 2'-O-methyl modified nucleoside with phosphorothioate linkage
  modified_base 2: mod_base = OTHER; note = 2'-fluoro-modified nucleoside with phosphorothioate linkage
  modified_base 3: mod_base = OTHER; note = 2'-O-methyl modified nucleoside
  modified_base 4: mod_base = OTHER; note = 2'-fluoro-modified nucleoside
  modified_base 5: mod_base = OTHER; note = 2'-O-methyl modified nucleoside
  modified_base 6: mod_base = OTHER; note = 2'-fluoro-modified nucleoside
  modified_base 7: mod_base = OTHER; note = 2'-O-methyl modified nucleoside
  modified_base 8: mod_base = OTHER; note = 2'-fluoro-modified nucleoside
  modified_base 9: mod_base = OTHER; note = 2'-O-methyl modified nucleoside
  modified_base 10: mod_base = OTHER; note = 2'-fluoro-modified nucleoside
  modified_base 11: mod_base = OTHER; note = 2'-O-methyl modified nucleoside
  modified_base 12: mod_base = OTHER; note = 2'-fluoro-modified nucleoside
  modified_base 13: mod_base = OTHER; note = 2'-O-methyl modified nucleoside
  modified_base 14: mod_base = OTHER; note = 2'-fluoro-modified nucleoside
  modified_base 15: mod_base = OTHER; note = 2'-O-methyl modified nucleoside
  modified_base 16: mod_base = OTHER; note = 2'-fluoro-modified nucleoside
  modified_base 17: mod_base = OTHER; note = 2'-O-methyl modified nucleoside
  modified_base 18: mod_base = OTHER; note = 2'-fluoro-modified nucleoside
  modified_base 19: mod_base = OTHER; note = 2'-O-methyl modified nucleoside with phosphorothioate linkage
  modified_base 20: mod_base = OTHER; note = 2'-O-methyl modified nucleoside with phosphorothioate linkage
  modified_base 21: mod_base = OTHER; note = 2'-O-methyl modified nucleoside
tggactcagctatcagttttt

SEQ ID NO: 13057 - RNA, 21 nt, synthetic construct
  source 1..21: mol_type = other RNA
  modified_base 1: mod_base = OTHER; note = 2'-O-methyl modified nucleoside with phosphorothioate linkage
  modified_base 2: mod_base = OTHER; note = 2'-fluoro-modified nucleoside with phosphorothioate linkage
  modified_base 3: mod_base = OTHER; note = 2'-O-methyl modified nucleoside
  modified_base 4: mod_base = OTHER; note = 2'-fluoro-modified nucleoside
  modified_base 5: mod_base = OTHER; note = 2'-O-methyl modified nucleoside
  modified_base 6: mod_base = OTHER; note = 2'-fluoro-modified nucleoside
  modified_base 7: mod_base = OTHER; note = 2'-O-methyl modified nucleoside
  modified_base 8: mod_base = OTHER; note = 2'-fluoro-modified nucleoside
  modified_base 9: mod_base = OTHER; note = 2'-O-methyl modified nucleoside
  modified_base 10: mod_base = OTHER; note = 2'-fluoro-modified nucleoside
  modified_base 11: mod_base = OTHER; note = 2'-O-methyl modified nucleoside
  modified_base 12: mod_base = OTHER; note = 2'-fluoro-modified nucleoside
  modified_base 13: mod_base = OTHER; note = 2'-O-methyl modified nucleoside
  modified_base 14: mod_base = OTHER; note = 2'-fluoro-modified nucleoside
  modified_base 15: mod_base = OTHER; note = 2'-O-methyl modified nucleoside
  modified_base 16: mod_base = OTHER; note = 2'-fluoro-modified nucleoside
  modified_base 17: mod_base = OTHER; note = 2'-O-methyl modified nucleoside
  modified_base 18: mod_base = OTHER; note = 2'-fluoro-modified nucleoside
  modified_base 19: mod_base = OTHER; note = 2'-O-methyl modified nucleoside with phosphorothioate linkage
  modified_base 20: mod_base = OTHER; note = 2'-O-methyl modified nucleoside with phosphorothioate linkage
  modified_base 21: mod_base = OTHER; note = 2'-O-methyl modified nucleoside
tgattcatccatgtcacaatt

SEQ ID NO: 13058 - RNA, 21 nt, synthetic construct
  source 1..21: mol_type = other RNA
  modified_base 1: mod_base = OTHER; note = 2'-O-methyl modified nucleoside with phosphorothioate linkage
  modified_base 2: mod_base = OTHER; note = 2'-fluoro-modified nucleoside with phosphorothioate linkage
  modified_base 3: mod_base = OTHER; note = 2'-O-methyl modified nucleoside
  modified_base 4: mod_base = OTHER; note = 2'-fluoro-modified nucleoside
  modified_base 5: mod_base = OTHER; note = 2'-O-methyl modified nucleoside
  modified_base 6: mod_base = OTHER; note = 2'-fluoro-modified nucleoside
  modified_base 7: mod_base = OTHER; note = 2'-O-methyl modified nucleoside
  modified_base 8: mod_base = OTHER; note = 2'-fluoro-modified nucleoside
  modified_base 9: mod_base = OTHER; note = 2'-O-methyl modified nucleoside
  modified_base 10: mod_base = OTHER; note = 2'-fluoro-modified nucleoside
  modified_base 11: mod_base = OTHER; note = 2'-O-methyl modified nucleoside
  modified_base 12: mod_base = OTHER; note = 2'-fluoro-modified nucleoside
  modified_base 13: mod_base = OTHER; note = 2'-O-methyl modified nucleoside
  modified_base 14: mod_base = OTHER; note = 2'-fluoro-modified nucleoside
  modified_base 15: mod_base = OTHER; note = 2'-O-methyl modified nucleoside
  modified_base 16: mod_base = OTHER; note = 2'-fluoro-modified nucleoside
  modified_base 17: mod_base = OTHER; note = 2'-O-methyl modified nucleoside
  modified_base 18: mod_base = OTHER; note = 2'-fluoro-modified nucleoside
  modified_base 19: mod_base = OTHER; note = 2'-O-methyl modified nucleoside with phosphorothioate linkage
  modified_base 20: mod_base = OTHER; note = 2'-O-methyl modified nucleoside with phosphorothioate linkage
  modified_base 21: mod_base = OTHER; note = 2'-O-methyl modified nucleoside
tcgaccaacactgtattcttt

SEQ ID NO: 13059 - RNA, 21 nt, synthetic construct
  source 1..21: mol_type = other RNA
  modified_base 1: mod_base = OTHER; note = 2'-O-methyl modified nucleoside with phosphorothioate linkage
  modified_base 2: mod_base = OTHER; note = 2'-fluoro-modified nucleoside with phosphorothioate linkage
  modified_base 3: mod_base = OTHER; note = 2'-O-methyl modified nucleoside
  modified_base 4: mod_base = OTHER; note = 2'-fluoro-modified nucleoside
  modified_base 5: mod_base = OTHER; note = 2'-O-methyl modified nucleoside
  modified_base 6: mod_base = OTHER; note = 2'-fluoro-modified nucleoside
  modified_base 7: mod_base = OTHER; note = 2'-O-methyl modified nucleoside
  modified_base 8: mod_base = OTHER; note = 2'-fluoro-modified nucleoside
  modified_base 9: mod_base = OTHER; note = 2'-O-methyl modified nucleoside
  modified_base 10: mod_base = OTHER; note = 2'-fluoro-modified nucleoside
  modified_base 11: mod_base = OTHER; note = 2'-O-methyl modified nucleoside
  modified_base 12: mod_base = OTHER; note = 2'-fluoro-modified nucleoside
  modified_base 13: mod_base = OTHER; note = 2'-O-methyl modified nucleoside
  modified_base 14: mod_base = OTHER; note = 2'-fluoro-modified nucleoside
  modified_base 15: mod_base = OTHER; note = 2'-O-methyl modified nucleoside
  modified_base 16: mod_base = OTHER; note = 2'-fluoro-modified nucleoside
  modified_base 17: mod_base = OTHER; note = 2'-O-methyl modified nucleoside
  modified_base 18: mod_base = OTHER; note = 2'-fluoro-modified nucleoside
  modified_base 19: mod_base = OTHER; note = 2'-O-methyl modified nucleoside with phosphorothioate linkage
  modified_base 20: mod_base = OTHER; note = 2'-O-methyl modified nucleoside with phosphorothioate linkage
  modified_base 21: mod_base = OTHER; note = 2'-O-methyl modified nucleoside
tatcgaccaacactgtatttt

SEQ ID NO: 13060 - RNA, 21 nt, synthetic construct
  source 1..21: mol_type = other RNA
  modified_base 1: mod_base = OTHER; note = 2'-O-methyl modified nucleoside with phosphorothioate linkage
  modified_base 2: mod_base = OTHER; note = 2'-fluoro-modified nucleoside with phosphorothioate linkage
  modified_base 3: mod_base = OTHER; note = 2'-O-methyl modified nucleoside
  modified_base 4: mod_base = OTHER; note = 2'-fluoro-modified nucleoside
  modified_base 5: mod_base = OTHER; note = 2'-O-methyl modified nucleoside
  modified_base 6: mod_base = OTHER; note = 2'-fluoro-modified nucleoside
  modified_base 7: mod_base = OTHER; note = 2'-O-methyl modified nucleoside
  modified_base 8: mod_base = OTHER; note = 2'-fluoro-modified nucleoside
  modified_base 9: mod_base = OTHER; note = 2'-O-methyl modified nucleoside
  modified_base 10: mod_base = OTHER; note = 2'-fluoro-modified nucleoside
  modified_base 11: mod_base = OTHER; note = 2'-O-methyl modified nucleoside
  modified_base 12: mod_base = OTHER; note = 2'-fluoro-modified nucleoside
  modified_base 13: mod_base = OTHER; note = 2'-O-methyl modified nucleoside
  modified_base 14: mod_base = OTHER; note = 2'-fluoro-modified nucleoside
  modified_base 15: mod_base = OTHER; note = 2'-O-methyl modified nucleoside
  modified_base 16: mod_base = OTHER; note = 2'-fluoro-modified nucleoside
  modified_base 17: mod_base = OTHER; note = 2'-O-methyl modified nucleoside
  modified_base 18: mod_base = OTHER; note = 2'-fluoro-modified nucleoside
  modified_base 19: mod_base = OTHER; note = 2'-O-methyl modified nucleoside with phosphorothioate linkage
  modified_base 20: mod_base = OTHER; note = 2'-O-methyl modified nucleoside with phosphorothioate linkage
  modified_base 21: mod_base = OTHER; note = 2'-O-methyl modified nucleoside
tcatcgaccaacactgtattt

SEQ ID NO: 13061 - RNA, 21 nt, synthetic construct
  source 1..21: mol_type = other RNA
  modified_base 1: mod_base = OTHER; note = 2'-O-methyl modified nucleoside with phosphorothioate linkage
  modified_base 2: mod_base = OTHER; note = 2'-fluoro-modified nucleoside with phosphorothioate linkage
  modified_base 3: mod_base = OTHER; note = 2'-O-methyl modified nucleoside
  modified_base 4: mod_base = OTHER; note = 2'-fluoro-modified nucleoside
  modified_base 5: mod_base = OTHER; note = 2'-O-methyl modified nucleoside
  modified_base 6: mod_base = OTHER; note = 2'-fluoro-modified nucleoside
  modified_base 7: mod_base = OTHER; note = 2'-O-methyl modified nucleoside
  modified_base 8: mod_base = OTHER; note = 2'-fluoro-modified nucleoside
  modified_base 9: mod_base = OTHER; note = 2'-O-methyl modified nucleoside
  modified_base 10: mod_base = OTHER; note = 2'-fluoro-modified nucleoside
  modified_base 11: mod_base = OTHER; note = 2'-O-methyl modified nucleoside
  modified_base 12: mod_base = OTHER; note = 2'-fluoro-modified nucleoside
  modified_base 13: mod_base = OTHER; note = 2'-O-methyl modified nucleoside
  modified_base 14: mod_base = OTHER; note = 2'-fluoro-modified nucleoside
  modified_base 15: mod_base = OTHER; note = 2'-O-methyl modified nucleoside
  modified_base 16: mod_base = OTHER; note = 2'-fluoro-modified nucleoside
  modified_base 17: mod_base = OTHER; note = 2'-O-methyl modified nucleoside
  modified_base 18: mod_base = OTHER; note = 2'-fluoro-modified nucleoside
  modified_base 19: mod_base = OTHER; note = 2'-O-methyl modified nucleoside with phosphorothioate linkage
  modified_base 20: mod_base = OTHER; note = 2'-O-methyl modified nucleoside with phosphorothioate linkage
  modified_base 21: mod_base = OTHER; note = 2'-O-methyl modified nucleoside
tacatcgaccaacactgtatt

SEQ ID NO: 13062 - RNA, 21 nt, synthetic construct
  source 1..21: mol_type = other RNA
  modified_base 1: mod_base = OTHER; note = 2'-O-methyl modified nucleoside with phosphorothioate linkage
  modified_base 2: mod_base = OTHER; note = 2'-fluoro-modified nucleoside with phosphorothioate linkage
  modified_base 3: mod_base = OTHER; note = 2'-O-methyl modified nucleoside
  modified_base 4: mod_base = OTHER; note = 2'-fluoro-modified nucleoside
  modified_base 5: mod_base = OTHER; note = 2'-O-methyl modified nucleoside
  modified_base 6: mod_base = OTHER; note = 2'-fluoro-modified nucleoside
  modified_base 7: mod_base = OTHER; note = 2'-O-methyl modified nucleoside
  modified_base 8: mod_base = OTHER; note = 2'-fluoro-modified nucleoside
  modified_base 9: mod_base = OTHER; note = 2'-O-methyl modified nucleoside
  modified_base 10: mod_base = OTHER; note = 2'-fluoro-modified nucleoside
  modified_base 11: mod_base = OTHER; note = 2'-O-methyl modified nucleoside
  modified_base 12: mod_base = OTHER; note = 2'-fluoro-modified nucleoside
  modified_base 13: mod_base = OTHER; note = 2'-O-methyl modified nucleoside
  modified_base 14: mod_base = OTHER; note = 2'-fluoro-modified nucleoside
  modified_base 15: mod_base = OTHER; note = 2'-O-methyl modified nucleoside
  modified_base 16: mod_base = OTHER; note = 2'-fluoro-modified nucleoside
  modified_base 17: mod_base = OTHER; note = 2'-O-methyl modified nucleoside
  modified_base 18: mod_base = OTHER; note = 2'-fluoro-modified nucleoside
  modified_base 19: mod_base = OTHER; note = 2'-O-methyl modified nucleoside with phosphorothioate linkage
  modified_base 20: mod_base = OTHER; note = 2'-O-methyl modified nucleoside with phosphorothioate linkage
  modified_base 21: mod_base = OTHER; note = 2'-O-methyl modified nucleoside
ttcacttgtgtgcttacattt

SEQ ID NO: 13063 - RNA, 21 nt, synthetic construct
  source 1..21: mol_type = other RNA
  modified_base 1: mod_base = OTHER; note = 2'-O-methyl modified nucleoside with phosphorothioate linkage
  modified_base 2: mod_base = OTHER; note = 2'-fluoro-modified nucleoside with phosphorothioate linkage
  modified_base 3: mod_base = OTHER; note = 2'-O-methyl modified nucleoside
  modified_base 4: mod_base = OTHER; note = 2'-fluoro-modified nucleoside
  modified_base 5: mod_base = OTHER; note = 2'-O-methyl modified nucleoside
  modified_base 6: mod_base = OTHER; note = 2'-fluoro-modified nucleoside
  modified_base 7: mod_base = OTHER; note = 2'-O-methyl modified nucleoside
  modified_base 8: mod_base = OTHER; note = 2'-fluoro-modified nucleoside
  modified_base 9: mod_base = OTHER; note = 2'-O-methyl modified nucleoside
  modified_base 10: mod_base = OTHER; note = 2'-fluoro-modified nucleoside
  modified_base 11: mod_base = OTHER; note = 2'-O-methyl modified nucleoside
  modified_base 12: mod_base = OTHER; note = 2'-fluoro-modified nucleoside
  modified_base 13: mod_base = OTHER; note = 2'-O-methyl modified nucleoside
  modified_base 14: mod_base = OTHER; note = 2'-fluoro-modified nucleoside
  modified_base 15: mod_base = OTHER; note = 2'-O-methyl modified nucleoside
  modified_base 16: mod_base = OTHER; note = 2'-fluoro-modified nucleoside
  modified_base 17: mod_base = OTHER; note = 2'-O-methyl modified nucleoside
  modified_base 18: mod_base = OTHER; note = 2'-fluoro-modified nucleoside
  modified_base 19: mod_base = OTHER; note = 2'-O-methyl modified nucleoside with phosphorothioate linkage
  modified_base 20: mod_base = OTHER; note = 2'-O-methyl modified nucleoside with phosphorothioate linkage
  modified_base 21: mod_base = OTHER; note = 2'-O-methyl modified nucleoside
tgatactggggttgaaaaatt

SEQ ID NO: 13064 - RNA, 21 nt, synthetic construct
  source 1..21: mol_type = other RNA
  modified_base 1: mod_base = OTHER; note = 2'-O-methyl modified nucleoside with phosphorothioate linkage
  modified_base 2: mod_base = OTHER; note = 2'-fluoro-modified nucleoside with phosphorothioate linkage
  modified_base 3: mod_base = OTHER; note = 2'-O-methyl modified nucleoside
  modified_base 4: mod_base = OTHER; note = 2'-fluoro-modified nucleoside
  modified_base 5: mod_base = OTHER; note = 2'-O-methyl modified nucleoside
  modified_base 6: mod_base = OTHER; note = 2'-fluoro-modified nucleoside
  modified_base 7: mod_base = OTHER; note = 2'-O-methyl modified nucleoside
  modified_base 8: mod_base = OTHER; note = 2'-fluoro-modified nucleoside
  modified_base 9: mod_base = OTHER; note = 2'-O-methyl modified nucleoside
  modified_base 10: mod_base = OTHER; note = 2'-fluoro-modified nucleoside
  modified_base 11: mod_base = OTHER; note = 2'-O-methyl modified nucleoside
  modified_base 12: mod_base = OTHER; note = 2'-fluoro-modified nucleoside
  modified_base 13: mod_base = OTHER; note = 2'-O-methyl modified nucleoside
  modified_base 14: mod_base = OTHER; note = 2'-fluoro-modified nucleoside
  modified_base 15: mod_base = OTHER; note = 2'-O-methyl modified nucleoside
  modified_base 16: mod_base = OTHER; note = 2'-fluoro-modified nucleoside
  modified_base 17: mod_base = OTHER; note = 2'-O-methyl modified nucleoside
  modified_base 18: mod_base = OTHER; note = 2'-fluoro-modified nucleoside
  modified_base 19: mod_base = OTHER; note = 2'-O-methyl modified nucleoside with phosphorothioate linkage
  modified_base 20: mod_base = OTHER; note = 2'-O-methyl modified nucleoside with phosphorothioate linkage
  modified_base 21: mod_base = OTHER; note = 2'-O-methyl modified nucleoside
ttcgctcttgaataaaaagtt

SEQ ID NO: 13065 - RNA, 21 nt, synthetic construct
  source 1..21: mol_type = other RNA
  modified_base 1: mod_base = OTHER; note = 2'-O-methyl modified nucleoside with phosphorothioate linkage
  modified_base 2: mod_base = OTHER; note = 2'-fluoro-modified nucleoside with phosphorothioate linkage
  modified_base 3: mod_base = OTHER; note = 2'-O-methyl modified nucleoside
  modified_base 4: mod_base = OTHER; note = 2'-fluoro-modified nucleoside
  modified_base 5: mod_base = OTHER; note = 2'-O-methyl modified nucleoside
  modified_base 6: mod_base = OTHER; note = 2'-fluoro-modified nucleoside
  modified_base 7: mod_base = OTHER; note = 2'-O-methyl modified nucleoside
  modified_base 8: mod_base = OTHER; note = 2'-fluoro-modified nucleoside
  modified_base 9: mod_base = OTHER; note = 2'-O-methyl modified nucleoside
  modified_base 10: mod_base = OTHER; note = 2'-fluoro-modified nucleoside
  modified_base 11: mod_base = OTHER; note = 2'-O-methyl modified nucleoside
  modified_base 12: mod_base = OTHER; note = 2'-fluoro-modified nucleoside
  modified_base 13: mod_base = OTHER; note = 2'-O-methyl modified nucleoside
  modified_base 14: mod_base = OTHER; note = 2'-fluoro-modified nucleoside
  modified_base 15: mod_base = OTHER; note = 2'-O-methyl modified nucleoside
  modified_base 16: mod_base = OTHER; note = 2'-fluoro-modified nucleoside
  modified_base 17: mod_base = OTHER; note = 2'-O-methyl modified nucleoside
  modified_base 18: mod_base = OTHER; note = 2'-fluoro-modified nucleoside
  modified_base 19: mod_base = OTHER; note = 2'-O-methyl modified nucleoside with phosphorothioate linkage
  modified_base 20: mod_base = OTHER; note = 2'-O-methyl modified nucleoside with phosphorothioate linkage
  modified_base 21: mod_base = OTHER; note = 2'-O-methyl modified nucleoside
tacatctcgctcttgaatatt

SEQ ID NO: 13066 - RNA, 21 nt, synthetic construct
  source 1..21: mol_type = other RNA
  modified_base 1: mod_base = OTHER; note = 2'-O-methyl modified nucleoside with phosphorothioate linkage
  modified_base 2: mod_base = OTHER; note = 2'-fluoro-modified nucleoside with phosphorothioate linkage
  modified_base 3: mod_base = OTHER; note = 2'-O-methyl modified nucleoside
  modified_base 4: mod_base = OTHER; note = 2'-fluoro-modified nucleoside
  modified_base 5: mod_base = OTHER; note = 2'-O-methyl modified nucleoside
  modified_base 6: mod_base = OTHER; note = 2'-fluoro-modified nucleoside
  modified_base 7: mod_base = OTHER; note = 2'-O-methyl modified nucleoside
  modified_base 8: mod_base = OTHER; note = 2'-fluoro-modified nucleoside
  modified_base 9: mod_base = OTHER; note = 2'-O-methyl modified nucleoside
  modified_base 10: mod_base = OTHER; note = 2'-fluoro-modified nucleoside
  modified_base 11: mod_base = OTHER; note = 2'-O-methyl modified nucleoside
  modified_base 12: mod_base = OTHER; note = 2'-fluoro-modified nucleoside
  modified_base 13: mod_base = OTHER; note = 2'-O-methyl modified nucleoside
  modified_base 14: mod_base = OTHER; note = 2'-fluoro-modified nucleoside
  modified_base 15: mod_base = OTHER; note = 2'-O-methyl modified nucleoside
  modified_base 16: mod_base = OTHER; note = 2'-fluoro-modified nucleoside
  modified_base 17: mod_base = OTHER; note = 2'-O-methyl modified nucleoside
  modified_base 18: mod_base = OTHER; note = 2'-fluoro-modified nucleoside
  modified_base 19: mod_base = OTHER; note = 2'-O-methyl modified nucleoside with phosphorothioate linkage
  modified_base 20: mod_base = OTHER; note = 2'-O-methyl modified nucleoside with phosphorothioate linkage
  modified_base 21: mod_base = OTHER; note = 2'-O-methyl modified nucleoside
tttattgcctgaagcaatgtt

SEQ ID NO: 13067 - RNA, 21 nt, synthetic construct
  source 1..21: mol_type = other RNA
  modified_base 1: mod_base = OTHER; note = 2'-O-methyl modified nucleoside with phosphorothioate linkage
  modified_base 2: mod_base = OTHER; note = 2'-fluoro-modified nucleoside with phosphorothioate linkage
  modified_base 3: mod_base = OTHER; note = 2'-O-methyl modified nucleoside
  modified_base 4: mod_base = OTHER; note = 2'-fluoro-modified nucleoside
  modified_base 5: mod_base = OTHER; note = 2'-O-methyl modified nucleoside
  modified_base 6: mod_base = OTHER; note = 2'-fluoro-modified nucleoside
  modified_base 7: mod_base = OTHER; note = 2'-O-methyl modified nucleoside
  modified_base 8: mod_base = OTHER; note = 2'-fluoro-modified nucleoside
  modified_base 9: mod_base = OTHER; note = 2'-O-methyl modified nucleoside
  modified_base 10: mod_base = OTHER; note = 2'-fluoro-modified nucleoside
  modified_base 11: mod_base = OTHER; note = 2'-O-methyl modified nucleoside
  modified_base 12: mod_base = OTHER; note = 2'-fluoro-modified nucleoside
  modified_base 13: mod_base = OTHER; note = 2'-O-methyl modified nucleoside
  modified_base 14: mod_base = OTHER; note = 2'-fluoro-modified nucleoside
  modified_base 15: mod_base = OTHER; note = 2'-O-methyl modified nucleoside
  modified_base 16: mod_base = OTHER; note = 2'-fluoro-modified nucleoside
  modified_base 17: mod_base = OTHER; note = 2'-O-methyl modified nucleoside
  modified_base 18: mod_base = OTHER; note = 2'-fluoro-modified nucleoside
  modified_base 19: mod_base = OTHER; note = 2'-O-methyl modified nucleoside with phosphorothioate linkage
  modified_base 20: mod_base = OTHER; note = 2'-O-methyl modified nucleoside with phosphorothioate linkage
  modified_base 21: mod_base = OTHER; note = 2'-O-methyl modified nucleoside
tgctgctgtcgaagtaatttt

SEQ ID NO: 13068 - RNA, 21 nt, synthetic construct
  source 1..21: mol_type = other RNA
  modified_base 1: mod_base = OTHER; note = 2'-O-methyl modified nucleoside with phosphorothioate linkage
  modified_base 2: mod_base = OTHER; note = 2'-fluoro-modified nucleoside with phosphorothioate linkage
  modified_base 3: mod_base = OTHER; note = 2'-O-methyl modified nucleoside
  modified_base 4: mod_base = OTHER; note = 2'-fluoro-modified nucleoside
  modified_base 5: mod_base = OTHER; note = 2'-O-methyl modified nucleoside
  modified_base 6: mod_base = OTHER; note = 2'-fluoro-modified nucleoside
  modified_base 7: mod_base = OTHER; note = 2'-O-methyl modified nucleoside
  modified_base 8: mod_base = OTHER; note = 2'-fluoro-modified nucleoside
  modified_base 9: mod_base = OTHER; note = 2'-O-methyl modified nucleoside
  modified_base 10: mod_base = OTHER; note = 2'-fluoro-modified nucleoside
  modified_base 11: mod_base = OTHER; note = 2'-O-methyl modified nucleoside
  modified_base 12: mod_base = OTHER; note = 2'-fluoro-modified nucleoside
  modified_base 13: mod_base = OTHER; note = 2'-O-methyl modified nucleoside
  modified_base 14: mod_base = OTHER; note = 2'-fluoro-modified nucleoside
  modified_base 15: mod_base = OTHER; note = 2'-O-methyl modified nucleoside
  modified_base 16: mod_base = OTHER; note = 2'-fluoro-modified nucleoside
  modified_base 17: mod_base = OTHER; note = 2'-O-methyl modified nucleoside
  modified_base 18: mod_base = OTHER; note = 2'-fluoro-modified nucleoside
  modified_base 19: mod_base = OTHER; note = 2'-O-methyl modified nucleoside with phosphorothioate linkage
  modified_base 20: mod_base = OTHER; note = 2'-O-methyl modified nucleoside with phosphorothioate linkage
  modified_base 21: mod_base = OTHER; note = 2'-O-methyl modified nucleoside
ttgctgctgtcgaagtaattt

SEQ ID NO: 13069 - RNA, 21 nt, synthetic construct
  source 1..21: mol_type = other RNA
  modified_base 1: mod_base = OTHER; note = 2'-O-methyl modified nucleoside with phosphorothioate linkage
  modified_base 2: mod_base = OTHER; note = 2'-fluoro-modified nucleoside with phosphorothioate linkage
  modified_base 3: mod_base = OTHER; note = 2'-O-methyl modified nucleoside
  modified_base 4: mod_base = OTHER; note = 2'-fluoro-modified nucleoside
  modified_base 5: mod_base = OTHER; note = 2'-O-methyl modified nucleoside
  modified_base 6: mod_base = OTHER; note = 2'-fluoro-modified nucleoside
  modified_base 7: mod_base = OTHER; note = 2'-O-methyl modified nucleoside
  modified_base 8: mod_base = OTHER; note = 2'-fluoro-modified nucleoside
  modified_base 9: mod_base = OTHER; note = 2'-O-methyl modified nucleoside
  modified_base 10: mod_base = OTHER; note = 2'-fluoro-modified nucleoside
  modified_base 11: mod_base = OTHER; note = 2'-O-methyl modified nucleoside
  modified_base 12: mod_base = OTHER; note = 2'-fluoro-modified nucleoside
  modified_base 13: mod_base = OTHER; note = 2'-O-methyl modified nucleoside
  modified_base 14: mod_base = OTHER; note = 2'-fluoro-modified nucleoside
  modified_base 15: mod_base = OTHER; note = 2'-O-methyl modified nucleoside
  modified_base 16: mod_base = OTHER; note = 2'-fluoro-modified nucleoside
  modified_base 17: mod_base = OTHER; note = 2'-O-methyl modified nucleoside
  modified_base 18: mod_base = OTHER; note = 2'-fluoro-modified nucleoside
  modified_base 19: mod_base = OTHER; note = 2'-O-methyl modified nucleoside with phosphorothioate linkage
  modified_base 20: mod_base = OTHER; note = 2'-O-methyl modified nucleoside with phosphorothioate linkage
  modified_base 21: mod_base = OTHER; note = 2'-O-methyl modified nucleoside
ttaccacaactgacaaaagtt

SEQ ID NO: 13070 - RNA, 21 nt, synthetic construct
  source 1..21: mol_type = other RNA
  modified_base 1: mod_base = OTHER; note = 2'-O-methyl modified nucleoside with phosphorothioate linkage
  modified_base 2: mod_base = OTHER; note = 2'-fluoro-modified nucleoside with phosphorothioate linkage
  modified_base 3: mod_base = OTHER; note = 2'-O-methyl modified nucleoside
  modified_base 4: mod_base = OTHER; note = 2'-fluoro-modified nucleoside
  modified_base 5: mod_base = OTHER; note = 2'-O-methyl modified nucleoside
  modified_base 6: mod_base = OTHER; note = 2'-fluoro-modified nucleoside
  modified_base 7: mod_base = OTHER; note = 2'-O-methyl modified nucleoside
  modified_base 8: mod_base = OTHER; note = 2'-fluoro-modified nucleoside
  modified_base 9: mod_base = OTHER; note = 2'-O-methyl modified nucleoside
  modified_base 10: mod_base = OTHER; note = 2'-fluoro-modified nucleoside
  modified_base 11: mod_base = OTHER; note = 2'-O-methyl modified nucleoside
  modified_base 12: mod_base = OTHER; note = 2'-fluoro-modified nucleoside
  modified_base 13: mod_base = OTHER; note = 2'-O-methyl modified nucleoside
  modified_base 14: mod_base = OTHER; note = 2'-fluoro-modified nucleoside
  modified_base 15: mod_base = OTHER; note = 2'-O-methyl modified nucleoside
  modified_base 16: mod_base = OTHER; note = 2'-fluoro-modified nucleoside
  modified_base 17: mod_base = OTHER; note = 2'-O-methyl modified nucleoside
  modified_base 18: mod_base = OTHER; note = 2'-fluoro-modified nucleoside
  modified_base 19: mod_base = OTHER; note = 2'-O-methyl modified nucleoside with phosphorothioate linkage
  modified_base 20: mod_base = OTHER; note = 2'-O-methyl modified nucleoside with phosphorothioate linkage
  modified_base 21: mod_base = OTHER; note = 2'-O-methyl modified nucleoside
tccaacaggtattatcaagtt

SEQ ID NO: 13071 - RNA, 21 nt, synthetic construct
  source 1..21: mol_type = other RNA
  modified_base 1: mod_base = OTHER; note = 2'-O-methyl modified nucleoside with phosphorothioate linkage
  modified_base 2: mod_base = OTHER; note = 2'-fluoro-modified nucleoside with phosphorothioate linkage
  modified_base 3: mod_base = OTHER; note = 2'-O-methyl modified nucleoside
  modified_base 4: mod_base = OTHER; note = 2'-fluoro-modified nucleoside
  modified_base 5: mod_base = OTHER; note = 2'-O-methyl modified nucleoside
  modified_base 6: mod_base = OTHER; note = 2'-fluoro-modified nucleoside
  modified_base 7: mod_base = OTHER; note = 2'-O-methyl modified nucleoside
  modified_base 8: mod_base = OTHER; note = 2'-fluoro-modified nucleoside
  modified_base 9: mod_base = OTHER; note = 2'-O-methyl modified nucleoside
  modified_base 10: mod_base = OTHER; note = 2'-fluoro-modified nucleoside
  modified_base 11: mod_base = OTHER; note = 2'-O-methyl modified nucleoside
  modified_base 12: mod_base = OTHER; note = 2'-fluoro-modified nucleoside
  modified_base 13: mod_base = OTHER; note = 2'-O-methyl modified nucleoside
  modified_base 14: mod_base = OTHER; note = 2'-fluoro-modified nucleoside
  modified_base 15: mod_base = OTHER; note = 2'-O-methyl modified nucleoside
  modified_base 16: mod_base = OTHER; note = 2'-fluoro-modified nucleoside
  modified_base 17: mod_base = OTHER; note = 2'-O-methyl modified nucleoside
  modified_base 18: mod_base = OTHER; note = 2'-fluoro-modified nucleoside
  modified_base 19: mod_base = OTHER; note = 2'-O-methyl modified nucleoside with phosphorothioate linkage
  modified_base 20: mod_base = OTHER; note = 2'-O-methyl modified nucleoside with phosphorothioate linkage
  modified_base 21: mod_base = OTHER; note = 2'-O-methyl modified nucleoside
tttccaacaggtattatcatt

SEQ ID NO: 13072 - RNA, 21 nt, synthetic construct
  source 1..21: mol_type = other RNA
  modified_base 1: mod_base = OTHER; note = 2'-O-methyl modified nucleoside with phosphorothioate linkage
  modified_base 2: mod_base = OTHER; note = 2'-fluoro-modified nucleoside with phosphorothioate linkage
  modified_base 3: mod_base = OTHER; note = 2'-O-methyl modified nucleoside
  modified_base 4: mod_base = OTHER; note = 2'-fluoro-modified nucleoside
  modified_base 5: mod_base = OTHER; note = 2'-O-methyl modified nucleoside
  modified_base 6: mod_base = OTHER; note = 2'-fluoro-modified nucleoside
  modified_base 7: mod_base = OTHER; note = 2'-O-methyl modified nucleoside
  modified_base 8: mod_base = OTHER; note = 2'-fluoro-modified nucleoside
  modified_base 9: mod_base = OTHER; note = 2'-O-methyl modified nucleoside
  modified_base 10: mod_base = OTHER; note = 2'-fluoro-modified nucleoside
  modified_base 11: mod_base = OTHER; note = 2'-O-methyl modified nucleoside
  modified_base 12: mod_base = OTHER; note = 2'-fluoro-modified nucleoside
  modified_base 13: mod_base = OTHER; note = 2'-O-methyl modified nucleoside
  modified_base 14: mod_base = OTHER; note = 2'-fluoro-modified nucleoside
  modified_base 15: mod_base = OTHER; note = 2'-O-methyl modified nucleoside
  modified_base 16: mod_base = OTHER; note = 2'-fluoro-modified nucleoside
  modified_base 17: mod_base = OTHER; note = 2'-O-methyl modified nucleoside
  modified_base 18: mod_base = OTHER; note = 2'-fluoro-modified nucleoside
  modified_base 19: mod_base = OTHER; note = 2'-O-methyl modified nucleoside with phosphorothioate linkage
  modified_base 20: mod_base = OTHER; note = 2'-O-methyl modified nucleoside with phosphorothioate linkage
  modified_base 21: mod_base = OTHER; note = 2'-O-methyl modified nucleoside
tattctaataacacctctttt

SEQ ID NO: 13073 - RNA, 21 nt, synthetic construct
  source 1..21: mol_type = other RNA
  modified_base 1: mod_base = OTHER; note = 2'-O-methyl modified nucleoside with phosphorothioate linkage
  modified_base 2: mod_base = OTHER; note = 2'-fluoro-modified nucleoside with phosphorothioate linkage
  modified_base 3: mod_base = OTHER; note = 2'-O-methyl modified nucleoside
  modified_base 4: mod_base = OTHER; note = 2'-fluoro-modified nucleoside
  modified_base 5: mod_base = OTHER; note = 2'-O-methyl modified nucleoside
  modified_base 6: mod_base = OTHER; note = 2'-fluoro-modified nucleoside
  modified_base 7: mod_base = OTHER; note = 2'-O-methyl modified nucleoside
  modified_base 8: mod_base = OTHER; note = 2'-fluoro-modified nucleoside
  modified_base 9: mod_base = OTHER; note = 2'-O-methyl modified nucleoside
  modified_base 10: mod_base = OTHER; note = 2'-fluoro-modified nucleoside
  modified_base 11: mod_base = OTHER; note = 2'-O-methyl modified nucleoside
  modified_base 12: mod_base = OTHER; note = 2'-fluoro-modified nucleoside
  modified_base 13: mod_base = OTHER; note = 2'-O-methyl modified nucleoside
  modified_base 14: mod_base = OTHER; note = 2'-fluoro-modified nucleoside
  modified_base 15: mod_base = OTHER; note = 2'-O-methyl modified nucleoside
  modified_base 16: mod_base = OTHER; note = 2'-fluoro-modified nucleoside
  modified_base 17: mod_base = OTHER; note = 2'-O-methyl modified nucleoside
  modified_base 18: mod_base = OTHER; note = 2'-fluoro-modified nucleoside
  modified_base 19: mod_base = OTHER; note = 2'-O-methyl modified nucleoside with phosphorothioate linkage
  modified_base 20: mod_base = OTHER; note = 2'-O-methyl modified nucleoside with phosphorothioate linkage
  modified_base 21: mod_base = OTHER; note = 2'-O-methyl modified nucleoside
tcatagttttttcgtaacatt

SEQ ID NO: 13074 - RNA, 21 nt, synthetic construct
  source 1..21: mol_type = other RNA
  modified_base 1: mod_base = OTHER; note = 2'-O-methyl modified nucleoside with phosphorothioate linkage
  modified_base 2: mod_base = OTHER; note = 2'-fluoro-modified nucleoside with phosphorothioate linkage
  modified_base 3: mod_base = OTHER; note = 2'-O-methyl modified nucleoside
  modified_base 4: mod_base = OTHER; note = 2'-fluoro-modified nucleoside
  modified_base 5: mod_base = OTHER; note = 2'-O-methyl modified nucleoside
  modified_base 6: mod_base = OTHER; note = 2'-fluoro-modified nucleoside
  modified_base 7: mod_base = OTHER; note = 2'-O-methyl modified nucleoside
  modified_base 8: mod_base = OTHER; note = 2'-fluoro-modified nucleoside
  modified_base 9: mod_base = OTHER; note = 2'-O-methyl modified nucleoside
  modified_base 10: mod_base = OTHER; note = 2'-fluoro-modified nucleoside
  modified_base 11: mod_base = OTHER; note = 2'-O-methyl modified nucleoside
  modified_base 12: mod_base = OTHER; note = 2'-fluoro-modified nucleoside
  modified_base 13: mod_base = OTHER; note = 2'-O-methyl modified nucleoside
  modified_base 14: mod_base = OTHER; note = 2'-fluoro-modified nucleoside
  modified_base 15: mod_base = OTHER; note = 2'-O-methyl modified nucleoside
  modified_base 16: mod_base = OTHER; note = 2'-fluoro-modified nucleoside
  modified_base 17: mod_base = OTHER; note = 2'-O-methyl modified nucleoside
  modified_base 18: mod_base = OTHER; note = 2'-fluoro-modified nucleoside
  modified_base 19: mod_base = OTHER; note = 2'-O-methyl modified nucleoside with phosphorothioate linkage
  modified_base 20: mod_base = OTHER; note = 2'-O-methyl modified nucleoside with phosphorothioate linkage
  modified_base 21: mod_base = OTHER; note = 2'-O-methyl modified nucleoside
tgaatatgctcagccagattt

SEQ ID NO: 13075 - RNA, 21 nt, synthetic construct
  source 1..21: mol_type = other RNA
  modified_base 1: mod_base = OTHER; note = 2'-O-methyl modified nucleoside with phosphorothioate linkage
  modified_base 2: mod_base = OTHER; note = 2'-fluoro-modified nucleoside with phosphorothioate linkage
  modified_base 3: mod_base = OTHER; note = 2'-O-methyl modified nucleoside
  modified_base 4: mod_base = OTHER; note = 2'-fluoro-modified nucleoside
  modified_base 5: mod_base = OTHER; note = 2'-O-methyl modified nucleoside
  modified_base 6: mod_base = OTHER; note = 2'-fluoro-modified nucleoside
  modified_base 7: mod_base = OTHER; note = 2'-O-methyl modified nucleoside
  modified_base 8: mod_base = OTHER; note = 2'-fluoro-modified nucleoside
  modified_base 9: mod_base = OTHER; note = 2'-O-methyl modified nucleoside
  modified_base 10: mod_base = OTHER; note = 2'-fluoro-modified nucleoside
  modified_base 11: mod_base = OTHER; note = 2'-O-methyl modified nucleoside
  modified_base 12: mod_base = OTHER; note = 2'-fluoro-modified nucleoside
  modified_base 13: mod_base = OTHER; note = 2'-O-methyl modified nucleoside
  modified_base 14: mod_base = OTHER; note = 2'-fluoro-modified nucleoside
  modified_base 15: mod_base = OTHER; note = 2'-O-methyl modified nucleoside
  modified_base 16: mod_base = OTHER; note = 2'-fluoro-modified nucleoside
  modified_base 17: mod_base = OTHER; note = 2'-O-methyl modified nucleoside
  modified_base 18: mod_base = OTHER; note = 2'-fluoro-modified nucleoside
  modified_base 19: mod_base = OTHER; note = 2'-O-methyl modified nucleoside with phosphorothioate linkage
  modified_base 20: mod_base = OTHER; note = 2'-O-methyl modified nucleoside with phosphorothioate linkage
  modified_base 21: mod_base = OTHER; note = 2'-O-methyl modified nucleoside
tcttgctagcagtgaatagtt

SEQ ID NO: 13076 - RNA, 21 nt, synthetic construct
  source 1..21: mol_type = other RNA
  modified_base 1: mod_base = OTHER; note = 2'-O-methyl modified nucleoside with phosphorothioate linkage
  modified_base 2: mod_base = OTHER; note = 2'-fluoro-modified nucleoside with phosphorothioate linkage
  modified_base 3: mod_base = OTHER; note = 2'-O-methyl modified nucleoside
  modified_base 4: mod_base = OTHER; note = 2'-fluoro-modified nucleoside
  modified_base 5: mod_base = OTHER; note = 2'-O-methyl modified nucleoside
  modified_base 6: mod_base = OTHER; note = 2'-fluoro-modified nucleoside
  modified_base 7: mod_base = OTHER; note = 2'-O-methyl modified nucleoside
  modified_base 8: mod_base = OTHER; note = 2'-fluoro-modified nucleoside
  modified_base 9: mod_base = OTHER; note = 2'-O-methyl modified nucleoside
  modified_base 10: mod_base = OTHER; note = 2'-fluoro-modified nucleoside
  modified_base 11: mod_base = OTHER; note = 2'-O-methyl modified nucleoside
  modified_base 12: mod_base = OTHER; note = 2'-fluoro-modified nucleoside
  modified_base 13: mod_base = OTHER; note = 2'-O-methyl modified nucleoside
  modified_base 14: mod_base = OTHER; note = 2'-fluoro-modified nucleoside
  modified_base 15: mod_base = OTHER; note = 2'-O-methyl modified nucleoside
  modified_base 16: mod_base = OTHER; note = 2'-fluoro-modified nucleoside
  modified_base 17: mod_base = OTHER; note = 2'-O-methyl modified nucleoside
  modified_base 18: mod_base = OTHER; note = 2'-fluoro-modified nucleoside
  modified_base 19: mod_base = OTHER; note = 2'-O-methyl modified nucleoside with phosphorothioate linkage
  modified_base 20: mod_base = OTHER; note = 2'-O-methyl modified nucleoside with phosphorothioate linkage
  modified_base 21: mod_base = OTHER; note = 2'-O-methyl modified nucleoside
tgtatggcatgcattactatt

SEQ ID NO: 13077 - RNA, 21 nt, synthetic construct
  source 1..21: mol_type = other RNA
  modified_base 1: mod_base = OTHER; note = 2'-O-methyl modified nucleoside with phosphorothioate linkage
  modified_base 2: mod_base = OTHER; note = 2'-fluoro-modified nucleoside with phosphorothioate linkage
  modified_base 3: mod_base = OTHER; note = 2'-O-methyl modified nucleoside
  modified_base 4: mod_base = OTHER; note = 2'-fluoro-modified nucleoside
  modified_base 5: mod_base = OTHER; note = 2'-O-methyl modified nucleoside
  modified_base 6: mod_base = OTHER; note = 2'-fluoro-modified nucleoside
  modified_base 7: mod_base = OTHER; note = 2'-O-methyl modified nucleoside
  modified_base 8: mod_base = OTHER; note = 2'-fluoro-modified nucleoside
  modified_base 9: mod_base = OTHER; note = 2'-O-methyl modified nucleoside
  modified_base 10: mod_base = OTHER; note = 2'-fluoro-modified nucleoside
  modified_base 11: mod_base = OTHER; note = 2'-O-methyl modified nucleoside
  modified_base 12: mod_base = OTHER; note = 2'-fluoro-modified nucleoside
  modified_base 13: mod_base = OTHER; note = 2'-O-methyl modified nucleoside
  modified_base 14: mod_base = OTHER; note = 2'-fluoro-modified nucleoside
  modified_base 15: mod_base = OTHER; note = 2'-O-methyl modified nucleoside
  modified_base 16: mod_base = OTHER; note = 2'-fluoro-modified nucleoside
  modified_base 17: mod_base = OTHER; note = 2'-O-methyl modified nucleoside
  modified_base 18: mod_base = OTHER; note = 2'-fluoro-modified nucleoside
  modified_base 19: mod_base = OTHER; note = 2'-O-methyl modified nucleoside with phosphorothioate linkage
  modified_base 20: mod_base = OTHER; note = 2'-O-methyl modified nucleoside with phosphorothioate linkage
  modified_base 21: mod_base = OTHER; note = 2'-O-methyl modified nucleoside
tgacatgaagtaccccatttt

SEQ ID NO: 13078 - RNA, 21 nt, synthetic construct
  source 1..21: mol_type = other RNA
  modified_base 1: mod_base = OTHER; note = 2'-O-methyl modified nucleoside with phosphorothioate linkage
  modified_base 2: mod_base = OTHER; note = 2'-fluoro-modified nucleoside with phosphorothioate linkage
  modified_base 3: mod_base = OTHER; note = 2'-O-methyl modified nucleoside
  modified_base 4: mod_base = OTHER; note = 2'-fluoro-modified nucleoside
  modified_base 5: mod_base = OTHER; note = 2'-O-methyl modified nucleoside
  modified_base 6: mod_base = OTHER; note = 2'-fluoro-modified nucleoside
  modified_base 7: mod_base = OTHER; note = 2'-O-methyl modified nucleoside
  modified_base 8: mod_base = OTHER; note = 2'-fluoro-modified nucleoside
  modified_base 9: mod_base = OTHER; note = 2'-O-methyl modified nucleoside
  modified_base 10: mod_base = OTHER; note = 2'-fluoro-modified nucleoside
  modified_base 11: mod_base = OTHER; note = 2'-O-methyl modified nucleoside
  modified_base 12: mod_base = OTHER; note = 2'-fluoro-modified nucleoside
  modified_base 13: mod_base = OTHER; note = 2'-O-methyl modified nucleoside
  modified_base 14: mod_base = OTHER; note = 2'-fluoro-modified nucleoside
  modified_base 15: mod_base = OTHER; note = 2'-O-methyl modified nucleoside
  modified_base 16: mod_base = OTHER; note = 2'-fluoro-modified nucleoside
  modified_base 17: mod_base = OTHER; note = 2'-O-methyl modified nucleoside
  modified_base 18: mod_base = OTHER; note = 2'-fluoro-modified nucleoside
  modified_base 19: mod_base = OTHER; note = 2'-O-methyl modified nucleoside with phosphorothioate linkage
  modified_base 20: mod_base = OTHER; note = 2'-O-methyl modified nucleoside with phosphorothioate linkage
  modified_base 21: mod_base = OTHER; note = 2'-O-methyl modified nucleoside
ttactggataaactttccttt

SEQ ID NO: 13079 - RNA, 21 nt, synthetic construct
  source 1..21: mol_type = other RNA
  modified_base 1: mod_base = OTHER; note = 2'-O-methyl modified nucleoside with phosphorothioate linkage
  modified_base 2: mod_base = OTHER; note = 2'-fluoro-modified nucleoside with phosphorothioate linkage
  modified_base 3: mod_base = OTHER; note = 2'-O-methyl modified nucleoside
  modified_base 4: mod_base = OTHER; note = 2'-fluoro-modified nucleoside
  modified_base 5: mod_base = OTHER; note = 2'-O-methyl modified nucleoside
  modified_base 6: mod_base = OTHER; note = 2'-fluoro-modified nucleoside
  modified_base 7: mod_base = OTHER; note = 2'-O-methyl modified nucleoside
  modified_base 8: mod_base = OTHER; note = 2'-fluoro-modified nucleoside
  modified_base 9: mod_base = OTHER; note = 2'-O-methyl modified nucleoside
  modified_base 10: mod_base = OTHER; note = 2'-fluoro-modified nucleoside
  modified_base 11: mod_base = OTHER; note = 2'-O-methyl modified nucleoside
  modified_base 12: mod_base = OTHER; note = 2'-fluoro-modified nucleoside
  modified_base 13: mod_base = OTHER; note = 2'-O-methyl modified nucleoside
  modified_base 14: mod_base = OTHER; note = 2'-fluoro-modified nucleoside
  modified_base 15: mod_base = OTHER; note = 2'-O-methyl modified nucleoside
  modified_base 16: mod_base = OTHER; note = 2'-fluoro-modified nucleoside
  modified_base 17: mod_base = OTHER; note = 2'-O-methyl modified nucleoside
  modified_base 18: mod_base = OTHER; note = 2'-fluoro-modified nucleoside
  modified_base 19: mod_base = OTHER; note = 2'-O-methyl modified nucleoside with phosphorothioate linkage
  modified_base 20: mod_base = OTHER; note = 2'-O-methyl modified nucleoside with phosphorothioate linkage
  modified_base 21: mod_base = OTHER; note = 2'-O-methyl modified nucleoside
tttgtgcaacttttgcagatt

SEQ ID NO: 13080 - RNA, 21 nt, synthetic construct
  source 1..21: mol_type = other RNA
  modified_base 1: mod_base = OTHER; note = 2'-O-methyl modified nucleoside with phosphorothioate linkage
  modified_base 2: mod_base = OTHER; note = 2'-fluoro-modified nucleoside with phosphorothioate linkage
  modified_base 3: mod_base = OTHER; note = 2'-O-methyl modified nucleoside
  modified_base 4: mod_base = OTHER; note = 2'-O-methyl modified nucleoside
  modified_base 5: mod_base = OTHER; note = 2'-fluoro-modified nucleoside
  modified_base 6: mod_base = OTHER; note = 2'-O-methyl modified nucleoside
  modified_base 7: mod_base = OTHER; note = 2'-fluoro-modified nucleoside
  modified_base 8: mod_base = OTHER; note = 2'-O-methyl modified nucleoside
  modified_base 9: mod_base = OTHER; note = 2'-O-methyl modified nucleoside
  modified_base 10: mod_base = OTHER; note = 2'-fluoro-modified nucleoside
  modified_base 11: mod_base = OTHER; note = 2'-O-methyl modified nucleoside
  modified_base 12: mod_base = OTHER; note = 2'-fluoro-modified nucleoside
  modified_base 13: mod_base = OTHER; note = 2'-O-methyl modified nucleoside
  modified_base 14: mod_base = OTHER; note = 2'-fluoro-modified nucleoside
  modified_base 15: mod_base = OTHER; note = 2'-O-methyl modified nucleoside
  modified_base 16: mod_base = OTHER; note = 2'-fluoro-modified nucleoside
  modified_base 17: mod_base = OTHER; note = 2'-O-methyl modified nucleoside
  modified_base 18: mod_base = OTHER; note = 2'-fluoro-modified nucleoside
  modified_base 19: mod_base = OTHER; note = 2'-O-methyl modified nucleoside with phosphorothioate linkage
  modified_base 20: mod_base = OTHER; note = 2'-O-methyl modified nucleoside with phosphorothioate linkage
  modified_base 21: mod_base = OTHER; note = 2'-O-methyl modified nucleoside
tgataagaaacgtctattgtt

SEQ ID NO: 13081 - RNA, 21 nt, synthetic construct
  source 1..21: mol_type = other RNA
  modified_base 1: mod_base = OTHER; note = 2'-O-methyl modified nucleoside with phosphorothioate linkage
  modified_base 2: mod_base = OTHER; note = 2'-fluoro-modified nucleoside with phosphorothioate linkage
  modified_base 3: mod_base = OTHER; note = 2'-O-methyl modified nucleoside
  modified_base 4: mod_base = OTHER; note = 2'-O-methyl modified nucleoside
  modified_base 5: mod_base = OTHER; note = 2'-fluoro-modified nucleoside
  modified_base 6: mod_base = OTHER; note = 2'-O-methyl modified nucleoside
  modified_base 7: mod_base = OTHER; note = 2'-fluoro-modified nucleoside
  modified_base 8: mod_base = OTHER; note = 2'-O-methyl modified nucleoside
  modified_base 9: mod_base = OTHER; note = 2'-fluoro-modified nucleoside
  modified_base 10: mod_base = OTHER; note = 2'-O-methyl modified nucleoside
  modified_base 11: mod_base = OTHER; note = 2'-O-methyl modified nucleoside
  modified_base 12: mod_base = OTHER; note = 2'-O-methyl modified nucleoside
  modified_base 13: mod_base = OTHER; note = 2'-O-methyl modified nucleoside
  modified_base 14: mod_base = OTHER; note = 2'-fluoro-modified nucleoside
  modified_base 15: mod_base = OTHER; note = 2'-O-methyl modified nucleoside
  modified_base 16: mod_base = OTHER; note = 2'-fluoro-modified nucleoside
  modified_base 17: mod_base = OTHER; note = 2'-O-methyl modified nucleoside
  modified_base 18: mod_base = OTHER; note = 2'-fluoro-modified nucleoside
  modified_base 19: mod_base = OTHER; note = 2'-O-methyl modified nucleoside with phosphorothioate linkage
  modified_base 20: mod_base = OTHER; note = 2'-O-methyl modified nucleoside with phosphorothioate linkage
  modified_base 21: mod_base = OTHER; note = 2'-O-methyl modified nucleoside
tgataagaaacgtctattgtt

SEQ ID NO: 13082 - RNA, 21 nt, synthetic construct
  source 1..21: mol_type = other RNA
atcagaatacagtgttggatt

SEQ ID NO: 13083 - RNA, 21 nt, synthetic construct
  source 1..21: mol_type = other RNA
gaatacagtgttggtcgaatt

SEQ ID NO: 13084 - RNA, 21 nt, synthetic construct
  source 1..21: mol_type = other RNA
  modified_base 9: mod_base = OTHER; note = Thymine
ctttgggtttgcggaatgatt

SEQ ID NO: 13085 - RNA, 21 nt, synthetic construct
  source 1..21: mol_type = other RNA
ataagggcatgtttgccaatt

SEQ ID NO: 13086 - RNA, 21 nt, synthetic construct
  source 1..21: mol_type = other RNA
agctgcaactgagacgaaatt

SEQ ID NO: 13087 - RNA, 21 nt, synthetic construct
  source 1..21: mol_type = other RNA
tctaccagttcatagatcatt

SEQ ID NO: 13088 - RNA, 21 nt, synthetic construct
  source 1..21: mol_type = other RNA
ctaccagttcatagatccatt

SEQ ID NO: 13089 - RNA, 21 nt, synthetic construct
  source 1..21: mol_type = other RNA
cttgatccataagcttggatt

SEQ ID NO: 13090 - RNA, 21 nt, synthetic construct
  source 1..21: mol_type = other RNA
acggaaagatgttctctaatt

SEQ ID NO: 13091 - RNA, 21 nt, synthetic construct
  source 1..21: mol_type = other RNA
tccatgggcatatagttgatt

SEQ ID NO: 13092 - RNA, 21 nt, synthetic construct
  source 1..21: mol_type = other RNA
tatagttgaattacttcgatt

SEQ ID NO: 13093 - RNA, 21 nt, synthetic construct
  source 1..21: mol_type = other RNA
atagttgaattacttcgaatt

SEQ ID NO: 13094 - RNA, 21 nt, synthetic construct
  source 1..21: mol_type = other RNA
agttgaattacttcgacaatt

SEQ ID NO: 13095 - RNA, 21 nt, synthetic construct
  source 1..21: mol_type = other RNA
ttcgacagcagcaattctatt

SEQ ID NO: 13096 - RNA, 21 nt, synthetic construct
  source 1..21: mol_type = other RNA
  modified_base 9: mod_base = OTHER; note = Thymine
agttgtggtagatactctatt

SEQ ID NO: 13097 - RNA, 21 nt, synthetic construct
  source 1..21: mol_type = other RNA
tggaatctcctatgatcgatt

SEQ ID NO: 13098 - RNA, 21 nt, synthetic construct
  source 1..21: mol_type = other RNA
tcgaaggtcactacaatgatt

SEQ ID NO: 13099 - RNA, 21 nt, synthetic construct
  source 1..21: mol_type = other RNA
tgttattagaatgttacgatt

SEQ ID NO: 13100 - RNA, 21 nt, synthetic construct
  source 1..21: mol_type = other RNA
aaactatggttgtgtccgatt

SEQ ID NO: 13101 - RNA, 21 nt, synthetic construct
  source 1..21: mol_type = other RNA
aagcgttgttaccagctaatt

SEQ ID NO: 13102 - RNA, 21 nt, synthetic construct
  source 1..21: mol_type = other RNA
tattcactgctagcaagtatt

SEQ ID NO: 13103 - RNA, 21 nt, synthetic construct
  source 1..21: mol_type = other RNA
attcactgctagcaagtcatt

SEQ ID NO: 13104 - RNA, 21 nt, synthetic construct
  source 1..21: mol_type = other RNA
ttatgtccacacacattgatt

SEQ ID NO: 13105 - RNA, 21 nt, synthetic construct
  source 1..21: mol_type = other RNA
aacagaaagaaatgttgcatt

SEQ ID NO: 13106 - RNA, 21 nt, synthetic construct
  source 1..21: mol_type = other RNA
atatattctgagttttgtatt

SEQ ID NO: 13107 - RNA, 19 nt, synthetic construct
  source 1..19: mol_type = other RNA
atcagaatacagtgttgga

SEQ ID NO: 13108 - RNA, 19 nt, synthetic construct
  source 1..19: mol_type = other RNA
gaatacagtgttggtcgaa

SEQ ID NO: 13109 - RNA, 19 nt, synthetic construct
  source 1..19: mol_type = other RNA
  modified_base 9: mod_base = OTHER; note = Thymine
ctttgggtttgcggaatga

SEQ ID NO: 13110 - RNA, 19 nt, synthetic construct
  source 1..19: mol_type = other RNA
ataagggcatgtttgccaa

SEQ ID NO: 13111 - RNA, 19 nt, synthetic construct
  source 1..19: mol_type = other RNA
agctgcaactgagacgaaa

SEQ ID NO: 13112 - RNA, 19 nt, synthetic construct
  source 1..19: mol_type = other RNA
tctaccagttcatagatca

SEQ ID NO: 13113 - RNA, 19 nt, synthetic construct
  source 1..19: mol_type = other RNA
ctaccagttcatagatcca

SEQ ID NO: 13114 - RNA, 19 nt, synthetic construct
  source 1..19: mol_type = other RNA
cttgatccataagcttgga

SEQ ID NO: 13115 - RNA, 19 nt, synthetic construct
  source 1..19: mol_type = other RNA
acggaaagatgttctctaa

SEQ ID NO: 13116 - RNA, 19 nt, synthetic construct
  source 1..19: mol_type = other RNA
tccatgggcatatagttga

SEQ ID NO: 13117 - RNA, 19 nt, synthetic construct
  source 1..19: mol_type = other RNA
tatagttgaattacttcga

SEQ ID NO: 13118 - RNA, 19 nt, synthetic construct
  source 1..19: mol_type = other RNA
atagttgaattacttcgaa

SEQ ID NO: 13119 - RNA, 19 nt, synthetic construct
  source 1..19: mol_type = other RNA
agttgaattacttcgacaa

SEQ ID NO: 13120 - RNA, 19 nt, synthetic construct
  source 1..19: mol_type = other RNA
ttcgacagcagcaattcta

SEQ ID NO: 13121 - RNA, 19 nt, synthetic construct
  source 1..19: mol_type = other RNA
  modified_base 9: mod_base = OTHER; note = Thymine
agttgtggtagatactcta

SEQ ID NO: 13122 - RNA, 19 nt, synthetic construct
  source 1..19: mol_type = other RNA
tggaatctcctatgatcga

SEQ ID NO: 13123 - RNA, 19 nt, synthetic construct
  source 1..19: mol_type = other RNA
tcgaaggtcactacaatga

SEQ ID NO: 13124 - RNA, 19 nt, synthetic construct
  source 1..19: mol_type = other RNA
tgttattagaatgttacga

SEQ ID NO: 13125 - RNA, 19 nt, synthetic construct
  source 1..19: mol_type = other RNA
aaactatggttgtgtccga

SEQ ID NO: 13126 - RNA, 19 nt, synthetic construct
  source 1..19: mol_type = other RNA
aagcgttgttaccagctaa

SEQ ID NO: 13127 - RNA, 19 nt, synthetic construct
  source 1..19: mol_type = other RNA
tattcactgctagcaagta

SEQ ID NO: 13128 - RNA, 19 nt, synthetic construct
  source 1..19: mol_type = other RNA
attcactgctagcaagtca

SEQ ID NO: 13129 - RNA, 19 nt, synthetic construct
  source 1..19: mol_type = other RNA
ttatgtccacacacattga

SEQ ID NO: 13130 - RNA, 19 nt, synthetic construct
  source 1..19: mol_type = other RNA
aacagaaagaaatgttgca

SEQ ID NO: 13131 - RNA, 19 nt, synthetic construct
  source 1..19: mol_type = other RNA
atatattctgagttttgta

SEQ ID NO: 13132 - RNA, 18 nt, synthetic construct
  source 1..18: mol_type = other RNA
atcagaatacagtgttgg

SEQ ID NO: 13133 - RNA, 18 nt, synthetic construct
  source 1..18: mol_type = other RNA
gaatacagtgttggtcga

SEQ ID NO: 13134 - RNA, 18 nt, synthetic construct
  source 1..18: mol_type = other RNA
  modified_base 9: mod_base = OTHER; note = Thymine
ctttgggtttgcggaatg

SEQ ID NO: 13135 - RNA, 18 nt, synthetic construct
  source 1..18: mol_type = other RNA
ataagggcatgtttgcca

SEQ ID NO: 13136 - RNA, 18 nt, synthetic construct
  source 1..18: mol_type = other RNA
agctgcaactgagacgaa

SEQ ID NO: 13137 - RNA, 18 nt, synthetic construct
  source 1..18: mol_type = other RNA
tctaccagttcatagatc

SEQ ID NO: 13138 - RNA, 18 nt, synthetic construct
  source 1..18: mol_type = other RNA
ctaccagttcatagatcc

SEQ ID NO: 13139 - RNA, 18 nt, synthetic construct
  source 1..18: mol_type = other RNA
cttgatccataagcttgg

SEQ ID NO: 13140 - RNA, 18 nt, synthetic construct
  source 1..18: mol_type = other RNA
acggaaagatgttctcta

SEQ ID NO: 13141 - RNA, 18 nt, synthetic construct
  source 1..18: mol_type = other RNA
tccatgggcatatagttg

SEQ ID NO: 13142 - RNA, 18 nt, synthetic construct
  source 1..18: mol_type = other RNA
tatagttgaattacttcg

SEQ ID NO: 13143 - RNA, 18 nt, synthetic construct
  source 1..18: mol_type = other RNA
atagttgaattacttcga

SEQ ID NO: 13144 - RNA, 18 nt, synthetic construct
  source 1..18: mol_type = other RNA
agttgaattacttcgaca

SEQ ID NO: 13145 - RNA, 18 nt, synthetic construct
  source 1..18: mol_type = other RNA
ttcgacagcagcaattct

SEQ ID NO: 13146 - RNA, 18 nt, synthetic construct
  source 1..18: mol_type = other RNA
  modified_base 9: mod_base = OTHER; note = Thymine
agttgtggtagatactct

SEQ ID NO: 13147 - RNA, 18 nt, synthetic construct
  source 1..18: mol_type = other RNA
tggaatctcctatgatcg

SEQ ID NO: 13148 - RNA, 18 nt, synthetic construct
  source 1..18: mol_type = other RNA
tcgaaggtcactacaatg

SEQ ID NO: 13149 - RNA, 18 nt, synthetic construct
  source 1..18: mol_type = other RNA
tgttattagaatgttacg

SEQ ID NO: 13150 - RNA, 18 nt, synthetic construct
  source 1..18: mol_type = other RNA
aaactatggttgtgtccg

SEQ ID NO: 13151 - RNA, 18 nt, synthetic construct
  source 1..18: mol_type = other RNA
aagcgttgttaccagcta

SEQ ID NO: 13152 - RNA, 18 nt, synthetic construct
  source 1..18: mol_type = other RNA
tattcactgctagcaagt

SEQ ID NO: 13153 - RNA, 18 nt, synthetic construct
  source 1..18: mol_type = other RNA
attcactgctagcaagtc

SEQ ID NO: 13154 - RNA, 18 nt, synthetic construct
  source 1..18: mol_type = other RNA
ttatgtccacacacattg

SEQ ID NO: 13155 - RNA, 18 nt, synthetic construct
  source 1..18: mol_type = other RNA
aacagaaagaaatgttgc

SEQ ID NO: 13156 - RNA, 18 nt, synthetic construct
  source 1..18: mol_type = other RNA
atatattctgagttttgt

SEQ ID NO: 13157 - RNA, 21 nt, synthetic construct
  source 1..21: mol_type = other RNA
  modified_base 15: mod_base = OTHER; note = Thymine
aaactatggttgtgtccgatt

SEQ ID NO: 13158 - RNA, 21 nt, synthetic construct
  source 1..21: mol_type = other RNA
aaactatggttgtgtccgatt

SEQ ID NO: 13159 - RNA, 21 nt, synthetic construct
  source 1..21: mol_type = other RNA
aaactatggttgtgtccgatt

SEQ ID NO: 13160 - RNA, 21 nt, synthetic construct
  source 1..21: mol_type = other RNA
aaactatggttgtgtccgatt

SEQ ID NO: 13161 - RNA, 21 nt, synthetic construct
  source 1..21: mol_type = other RNA
aaactatggttgtgtccgatt

SEQ ID NO: 13162 - RNA, 21 nt, synthetic construct
  source 1..21: mol_type = other RNA
aaactatggttgtgtccgatt

SEQ ID NO: 13163 - RNA, 21 nt, synthetic construct
  source 1..21: mol_type = other RNA
aaactatggttgtgtccgatt

SEQ ID NO: 13164 - RNA, 21 nt, synthetic construct
  source 1..21: mol_type = other RNA
  modified_base 5: mod_base = OTHER; note = Thymine
  modified_base 13: mod_base = OTHER; note = Thymine
aaactatggttgtgtccgatt

SEQ ID NO: 13165 - RNA, 21 nt, synthetic construct
  source 1..21: mol_type = other RNA
tgttattagaatgttacgatt

SEQ ID NO: 13166 - RNA, 21 nt, synthetic construct
  source 1..21: mol_type = other RNA
tgttattagaatgttacgatt

SEQ ID NO: 13167 - RNA, 21 nt, synthetic construct
  source 1..21: mol_type = other RNA
tgttattagaatgttacgatt

SEQ ID NO: 13168 - RNA, 21 nt, synthetic construct
  source 1..21: mol_type = other RNA
tgttattagaatgttacgatt

SEQ ID NO: 13169 - RNA, 21 nt, synthetic construct
  source 1..21: mol_type = other RNA
tgttattagaatgttacgatt

SEQ ID NO: 13170 - RNA, 21 nt, synthetic construct
  source 1..21: mol_type = other RNA
tgttattagaatgttacgatt

SEQ ID NO: 13171 - RNA, 21 nt, synthetic construct
  source 1..21: mol_type = other RNA
tgttattagaatgttacgatt

SEQ ID NO: 13172 - RNA, 21 nt, synthetic construct
  source 1..21: mol_type = other RNA
tgttattagaatgttacgatt

SEQ ID NO: 13173 - RNA, 21 nt, synthetic construct
  source 1..21: mol_type = other RNA
tgttattagaatgttacgatt

SEQ ID NO: 13174 - RNA, 19 nt, synthetic construct
  source 1..19: mol_type = other RNA
  modified_base 15: mod_base = OTHER; note = Thymine
aaactatggttgtgtccga

SEQ ID NO: 13175 - RNA, 19 nt, synthetic construct
  source 1..19: mol_type = other RNA
aaactatggttgtgtccga

SEQ ID NO: 13176 - RNA, 19 nt, synthetic construct
  source 1..19: mol_type = other RNA
aaactatggttgtgtccga

SEQ ID NO: 13177 - RNA, 19 nt, synthetic construct
  source 1..19: mol_type = other RNA
aaactatggttgtgtccga

SEQ ID NO: 13178 - RNA, 19 nt, synthetic construct
  source 1..19: mol_type = other RNA
aaactatggttgtgtccga

SEQ ID NO: 13179 - RNA, 19 nt, synthetic construct
  source 1..19: mol_type = other RNA
aaactatggttgtgtccga

SEQ ID NO: 13180 - RNA, 19 nt, synthetic construct
  source 1..19: mol_type = other RNA
aaactatggttgtgtccga

SEQ ID NO: 13181 - RNA, 19 nt, synthetic construct
  source 1..19: mol_type = other RNA
  modified_base 5: mod_base = OTHER; note = Thymine
  modified_base 13: mod_base = OTHER; note = Thymine
aaactatggttgtgtccga

SEQ ID NO: 13182 - RNA, 19 nt, synthetic construct
  source 1..19: mol_type = other RNA
tgttattagaatgttacga

SEQ ID NO: 13183 - RNA, 19 nt, synthetic construct
  source 1..19: mol_type = other RNA
tgttattagaatgttacga

SEQ ID NO: 13184 - RNA, 19 nt, synthetic construct
  source 1..19: mol_type = other RNA
tgttattagaatgttacga

SEQ ID NO: 13185 - RNA, 19 nt, synthetic construct
  source 1..19: mol_type = other RNA
tgttattagaatgttacga

SEQ ID NO: 13186 - RNA, 19 nt, synthetic construct
  source 1..19: mol_type = other RNA
tgttattagaatgttacga

SEQ ID NO: 13187 - RNA, 19 nt, synthetic construct
  source 1..19: mol_type = other RNA
tgttattagaatgttacga

SEQ ID NO: 13188 - RNA, 19 nt, synthetic construct
  source 1..19: mol_type = other RNA
tgttattagaatgttacga

SEQ ID NO: 13189 - RNA, 19 nt, synthetic construct
  source 1..19: mol_type = other RNA
tgttattagaatgttacga

SEQ ID NO: 13190 - RNA, 19 nt, synthetic construct
  source 1..19: mol_type = other RNA
tgttattagaatgttacga

SEQ ID NO: 13191 - RNA, 18 nt, synthetic construct
  source 1..18: mol_type = other RNA
  modified_base 15: mod_base = OTHER; note = Thymine
aaactatggttgtgtccg

SEQ ID NO: 13192 - RNA, 18 nt, synthetic construct
  source 1..18: mol_type = other RNA
aaactatggttgtgtccg

SEQ ID NO: 13193 - RNA, 18 nt, synthetic construct
  source 1..18: mol_type = other RNA
aaactatggttgtgtccg

SEQ ID NO: 13194 - RNA, 18 nt, synthetic construct
  source 1..18: mol_type = other RNA
aaactatggttgtgtccg

SEQ ID NO: 13195 - RNA, 18 nt, synthetic construct
  source 1..18: mol_type = other RNA
aaactatggttgtgtccg

SEQ ID NO: 13196 - RNA, 18 nt, synthetic construct
  source 1..18: mol_type = other RNA
aaactatggttgtgtccg

SEQ ID NO: 13197 - RNA, 18 nt, synthetic construct
  source 1..18: mol_type = other RNA
aaactatggttgtgtccg

SEQ ID NO: 13198 - RNA, 18 nt, synthetic construct
  source 1..18: mol_type = other RNA
  modified_base 5: mod_base = OTHER; note = Thymine
  modified_base 13: mod_base = OTHER; note = Thymine
aaactatggttgtgtccg

SEQ ID NO: 13199 - RNA, 18 nt, synthetic construct
  source 1..18: mol_type = other RNA
tgttattagaatgttacg

SEQ ID NO: 13200 - RNA, 18 nt, synthetic construct
  source 1..18: mol_type = other RNA
tgttattagaatgttacg

SEQ ID NO: 13201 - RNA, 18 nt, synthetic construct
  source 1..18: mol_type = other RNA
tgttattagaatgttacg

SEQ ID NO: 13202 - RNA, 18 nt, synthetic construct
  source 1..18: mol_type = other RNA
tgttattagaatgttacg

SEQ ID NO: 13203 - RNA, 18 nt, synthetic construct
  source 1..18: mol_type = other RNA
tgttattagaatgttacg

SEQ ID NO: 13204 - RNA, 18 nt, synthetic construct
  source 1..18: mol_type = other RNA
tgttattagaatgttacg

SEQ ID NO: 13205 - RNA, 18 nt, synthetic construct
  source 1..18: mol_type = other RNA
tgttattagaatgttacg

SEQ ID NO: 13206 - RNA, 18 nt, synthetic construct
  source 1..18: mol_type = other RNA
tgttattagaatgttacg

SEQ ID NO: 13207 - RNA, 18 nt, synthetic construct
  source 1..18: mol_type = other RNA
tgttattagaatgttacg

SEQ ID NO: 13208 - RNA, 21 nt, synthetic construct
  source 1..21: mol_type = other RNA
tggaatctcctatgatcgatt

SEQ ID NO: 13209 - RNA, 21 nt, synthetic construct
  source 1..21: mol_type = other RNA
tggaatctcctatgatcgatt

SEQ ID NO: 13210 - RNA, 21 nt, synthetic construct
  source 1..21: mol_type = other RNA
tggaatctcctatgatcgatt

SEQ ID NO: 13211 - RNA, 21 nt, synthetic construct
  source 1..21: mol_type = other RNA
tggaatctcctatgatcgatt

SEQ ID NO: 13212 - RNA, 21 nt, synthetic construct
  source 1..21: mol_type = other RNA
tggaatctcctatgatcgatt

SEQ ID NO: 13213 - RNA, 21 nt, synthetic construct
  source 1..21: mol_type = other RNA
tggaatctcctatgatcgatt

SEQ ID NO: 13214 - RNA, 21 nt, synthetic construct
  source 1..21: mol_type = other RNA
tggaatctcctatgatcgatt

SEQ ID NO: 13215 - RNA, 21 nt, synthetic construct
  source 1..21: mol_type = other RNA
tggaatctcctatgatcgatt

SEQ ID NO: 13216 - RNA, 21 nt, synthetic construct
  source 1..21: mol_type = other RNA
attcactgctagcaagtcatt

SEQ ID NO: 13217 - RNA, 21 nt, synthetic construct
  source 1..21: mol_type = other RNA
attcactgctagcaagtcatt

SEQ ID NO: 13218 - RNA, 21 nt, synthetic construct
  source 1..21: mol_type = other RNA
attcactgctagcaagtcatt

SEQ ID NO: 13219 - RNA, 21 nt, synthetic construct
  source 1..21: mol_type = other RNA
attcactgctagcaagtcatt

SEQ ID NO: 13220 - RNA, 21 nt, synthetic construct
  source 1..21: mol_type = other RNA
attcactgctagcaagtcatt

SEQ ID NO: 13221 - RNA, 21 nt, synthetic construct
  source 1..21: mol_type = other RNA
attcactgctagcaagtcatt

SEQ ID NO: 13222 - RNA, 21 nt, synthetic construct
  source 1..21: mol_type = other RNA
attcactgctagcaagtcatt

SEQ ID NO: 13223 - RNA, 21 nt, synthetic construct
  source 1..21: mol_type = other RNA
attcactgctagcaagtcatt

SEQ ID NO: 13224 - RNA, 21 nt, synthetic construct
  source 1..21: mol_type = other RNA
attcactgctagcaagtcatt

SEQ ID NO: 13225 - RNA, 19 nt, synthetic construct
  source 1..19: mol_type = other RNA
tggaatctcctatgatcga

SEQ ID NO: 13226 - RNA, 19 nt, synthetic construct
  source 1..19: mol_type = other RNA
tggaatctcctatgatcga

SEQ ID NO: 13227 - RNA, 19 nt, synthetic construct
  source 1..19: mol_type = other RNA
tggaatctcctatgatcga

SEQ ID NO: 13228 - RNA, 19 nt, synthetic construct
  source 1..19: mol_type = other RNA
tggaatctcctatgatcga

SEQ ID NO: 13229 - RNA, 19 nt, synthetic construct
  source 1..19: mol_type = other RNA
tggaatctcctatgatcga

SEQ ID NO: 13230 - RNA, 19 nt, synthetic construct
  source 1..19: mol_type = other RNA
tggaatctcctatgatcga

SEQ ID NO: 13231 - RNA, 19 nt, synthetic construct
  source 1..19: mol_type = other RNA
tggaatctcctatgatcga

SEQ ID NO: 13232 - RNA, 19 nt, synthetic construct
  source 1..19: mol_type = other RNA
tggaatctcctatgatcga

SEQ ID NO: 13233 - RNA, 19 nt, synthetic construct
  source 1..19: mol_type = other RNA
attcactgctagcaagtca

SEQ ID NO: 13234 - RNA, 19 nt, synthetic construct
  source 1..19: mol_type = other RNA
attcactgctagcaagtca

SEQ ID NO: 13235 - RNA, 19 nt, synthetic construct
  source 1..19: mol_type = other RNA
attcactgctagcaagtca

SEQ ID NO: 13236 - RNA, 19 nt, synthetic construct
  source 1..19: mol_type = other RNA
attcactgctagcaagtca

SEQ ID NO: 13237 - RNA, 19 nt, synthetic construct
  source 1..19: mol_type = other RNA
attcactgctagcaagtca

SEQ ID NO: 13238 - RNA, 19 nt, synthetic construct
  source 1..19: mol_type = other RNA
attcactgctagcaagtca

SEQ ID NO: 13239 - RNA, 19 nt, synthetic construct
  source 1..19: mol_type = other RNA
attcactgctagcaagtca

SEQ ID NO: 13240 - RNA, 19 nt, synthetic construct
  source 1..19: mol_type = other RNA
attcactgctagcaagtca

SEQ ID NO: 13241 - RNA, 19 nt, synthetic construct
  source 1..19: mol_type = other RNA
attcactgctagcaagtca

SEQ ID NO: 13242 - RNA, 18 nt, synthetic construct
  source 1..18: mol_type = other RNA
tggaatctcctatgatcg

SEQ ID NO: 13243 - RNA, 18 nt, synthetic construct
  source 1..18: mol_type = other RNA
tggaatctcctatgatcg

SEQ ID NO: 13244 - RNA, 18 nt, synthetic construct
  source 1..18: mol_type = other RNA
tggaatctcctatgatcg

SEQ ID NO: 13245 - RNA, 18 nt, synthetic construct
  source 1..18: mol_type = other RNA
tggaatctcctatgatcg

SEQ ID NO: 13246 - RNA, 18 nt, synthetic construct
  source 1..18: mol_type = other RNA
tggaatctcctatgatcg

SEQ ID NO: 13247 - RNA, 18 nt, synthetic construct
  source 1..18: mol_type = other RNA
tggaatctcctatgatcg

SEQ ID NO: 13248 - RNA, 18 nt, synthetic construct
  source 1..18: mol_type = other RNA
tggaatctcctatgatcg

SEQ ID NO: 13249 - RNA, 18 nt, synthetic construct
  source 1..18: mol_type = other RNA
tggaatctcctatgatcg

SEQ ID NO: 13250 - RNA, 18 nt, synthetic construct
  source 1..18: mol_type = other RNA
attcactgctagcaagtc

SEQ ID NO: 13251 - RNA, 18 nt, synthetic construct
  source 1..18: mol_type = other RNA
attcactgctagcaagtc

SEQ ID NO: 13252 - RNA, 18 nt, synthetic construct
  source 1..18: mol_type = other RNA
attcactgctagcaagtc

SEQ ID NO: 13253 - RNA, 18 nt, synthetic construct
  source 1..18: mol_type = other RNA
attcactgctagcaagtc

SEQ ID NO: 13254 - RNA, 18 nt, synthetic construct
  source 1..18: mol_type = other RNA
attcactgctagcaagtc

SEQ ID NO: 13255 - RNA, 18 nt, synthetic construct
  source 1..18: mol_type = other RNA
attcactgctagcaagtc

SEQ ID NO: 13256 - RNA, 18 nt, synthetic construct
  source 1..18: mol_type = other RNA
attcactgctagcaagtc

SEQ ID NO: 13257 - RNA, 18 nt, synthetic construct
  source 1..18: mol_type = other RNA
attcactgctagcaagtc

SEQ ID NO: 13258 - RNA, 18 nt, synthetic construct
  source 1..18: mol_type = other RNA
attcactgctagcaagtc

SEQ ID NO: 13259 - RNA, 21 nt, synthetic construct
  source 1..21: mol_type = other RNA
tccatgggcatatagttgatt

SEQ ID NO: 13260 - RNA, 21 nt, synthetic construct
  source 1..21: mol_type = other RNA
tccatgggcatatagttgatt

SEQ ID NO: 13261 - RNA, 21 nt, synthetic construct
  source 1..21: mol_type = other RNA
tccatgggcatatagttgatt

SEQ ID NO: 13262 - RNA, 21 nt, synthetic construct
  source 1..21: mol_type = other RNA
tccatgggcatatagttgatt

SEQ ID NO: 13263 - RNA, 21 nt, synthetic construct
  source 1..21: mol_type = other RNA
tccatgggcatatagttgatt

SEQ ID NO: 13264 - RNA, 21 nt, synthetic construct
  source 1..21: mol_type = other RNA
tccatgggcatatagttgatt

SEQ ID NO: 13265 - RNA, 21 nt, synthetic construct
  source 1..21: mol_type = other RNA
tccatgggcatatagttgatt

SEQ ID NO: 13266 - RNA, 21 nt, synthetic construct
  source 1..21: mol_type = other RNA
tccatgggcatatagttgatt

SEQ ID NO: 13267 - RNA, 21 nt, synthetic construct
  source 1..21: mol_type = other RNA
atatattctgagttttgtatt

SEQ ID NO: 13268 - RNA, 21 nt, synthetic construct
  source 1..21: mol_type = other RNA
atatattctgagttttgtatt

SEQ ID NO: 13269 - RNA, 21 nt, synthetic construct
  source 1..21: mol_type = other RNA
atatattctgagttttgtatt

SEQ ID NO: 13270 - RNA, 21 nt, synthetic construct
  source 1..21: mol_type = other RNA
atatattctgagttttgtatt

SEQ ID NO: 13271 - RNA, 21 nt, synthetic construct
  source 1..21: mol_type = other RNA
atatattctgagttttgtatt

SEQ ID NO: 13272 - RNA, 21 nt, synthetic construct
  source 1..21: mol_type = other RNA
atatattctgagttttgtatt

SEQ ID NO: 13273 - RNA, 21 nt, synthetic construct
  source 1..21: mol_type = other RNA
atatattctgagttttgtatt

SEQ ID NO: 13274 - RNA, 21 nt, synthetic construct
  source 1..21: mol_type = other RNA
atatattctgagttttgtatt

SEQ ID NO: 13275 - RNA, 19 nt, synthetic construct
  source 1..19: mol_type = other RNA
tccatgggcatatagttga

SEQ ID NO: 13276 - RNA, 19 nt, synthetic construct
  source 1..19: mol_type = other RNA
tccatgggcatatagttga

SEQ ID NO: 13277 - RNA, 19 nt, synthetic construct
  source 1..19: mol_type = other RNA
tccatgggcatatagttga

SEQ ID NO: 13278 - RNA, 19 nt, synthetic construct
  source 1..19: mol_type = other RNA
tccatgggcatatagttga

SEQ ID NO: 13279 - RNA, 19 nt, synthetic construct
  source 1..19: mol_type = other RNA
tccatgggcatatagttga

SEQ ID NO: 13280 - RNA, 19 nt, synthetic construct
  source 1..19: mol_type = other RNA
tccatgggcatatagttga

SEQ ID NO: 13281 - RNA, 19 nt, synthetic construct
  source 1..19: mol_type = other RNA
tccatgggcatatagttga

SEQ ID NO: 13282 - RNA, 19 nt, synthetic construct
  source 1..19: mol_type = other RNA
tccatgggcatatagttga

SEQ ID NO: 13283 - RNA, 19 nt, synthetic construct
  source 1..19: mol_type = other RNA
atatattctgagttttgta

SEQ ID NO: 13284 - RNA, 19 nt, synthetic construct
  source 1..19: mol_type = other RNA
atatattctgagttttgta

SEQ ID NO: 13285 - RNA, 19 nt, synthetic construct
  source 1..19: mol_type = other RNA
atatattctgagttttgta

SEQ ID NO: 13286 - RNA, 19 nt, synthetic construct
  source 1..19: mol_type = other RNA
atatattctgagttttgta

SEQ ID NO: 13287 - RNA, 19 nt, synthetic construct
  source 1..19: mol_type = other RNA
atatattctgagttttgta

SEQ ID NO: 13288 - RNA, 19 nt, synthetic construct
  source 1..19: mol_type = other RNA
atatattctgagttttgta

SEQ ID NO: 13289 - RNA, 19 nt, synthetic construct
  source 1..19: mol_type = other RNA
atatattctgagttttgta

SEQ ID NO: 13290 - RNA, 19 nt, synthetic construct
  source 1..19: mol_type = other RNA
atatattctgagttttgta

SEQ ID NO: 13291 - RNA, 18 nt, synthetic construct
  source 1..18: mol_type = other RNA
tccatgggcatatagttg

SEQ ID NO: 13292 - RNA, 18 nt, synthetic construct
  source 1..18: mol_type = other RNA
tccatgggcatatagttg

SEQ ID NO: 13293 - RNA, 18 nt, synthetic construct
  source 1..18: mol_type = other RNA
tccatgggcatatagttg

SEQ ID NO: 13294 - RNA, 18 nt, synthetic construct
  source 1..18: mol_type = other RNA
tccatgggcatatagttg

SEQ ID NO: 13295 - RNA, 18 nt, synthetic construct
  source 1..18: mol_type = other RNA
tccatgggcatatagttg

SEQ ID NO: 13296 - RNA, 18 nt, synthetic construct
  source 1..18: mol_type = other RNA
tccatgggcatatagttg

SEQ ID NO: 13297 - RNA, 18 nt, synthetic construct
  source 1..18: mol_type = other RNA
tccatgggcatatagttg

SEQ ID NO: 13298 - RNA, 18 nt, synthetic construct
  source 1..18: mol_type = other RNA
tccatgggcatatagttg

SEQ ID NO: 13299 - RNA, 18 nt, synthetic construct
  source 1..18: mol_type = other RNA
atatattctgagttttgt

SEQ ID NO: 13300 - RNA, 18 nt, synthetic construct
  source 1..18: mol_type = other RNA
atatattctgagttttgt

SEQ ID NO: 13301 - RNA, 18 nt, synthetic construct
  source 1..18: mol_type = other RNA
atatattctgagttttgt

SEQ ID NO: 13302 - RNA, 18 nt, synthetic construct
  source 1..18: mol_type = other RNA
atatattctgagttttgt

SEQ ID NO: 13303 - RNA, 18 nt, synthetic construct
  source 1..18: mol_type = other RNA
atatattctgagttttgt

SEQ ID NO: 13304 - RNA, 18 nt, synthetic construct
  source 1..18: mol_type = other RNA
atatattctgagttttgt

SEQ ID NO: 13305 - RNA, 18 nt, synthetic construct
  source 1..18: mol_type = other RNA
atatattctgagttttgt

SEQ ID NO: 13306 - RNA, 18 nt, synthetic construct
  source 1..18: mol_type = other RNA
atatattctgagttttgt

SEQ ID NO: 13307 - RNA, 21 nt, synthetic construct
  source 1..21: mol_type = other RNA
attcactgctagcaagtcatt

SEQ ID NO: 13308 - RNA, 21 nt, synthetic construct
  source 1..21: mol_type = other RNA
attcactgctagcaagtcatt

SEQ ID NO: 13309 - RNA, 21 nt, synthetic construct
  source 1..21: mol_type = other RNA
attcactgctagcaagtcatt

SEQ ID NO: 13310 - RNA, 21 nt, synthetic construct
  source 1..21: mol_type = other RNA
attcactgctagcaagtcatt

SEQ ID NO: 13311 - RNA, 21 nt, synthetic construct
  source 1..21: mol_type = other RNA
tggaatctcctatgatcgatt

SEQ ID NO: 13312 - RNA, 21 nt, synthetic construct
  source 1..21: mol_type = other RNA
tggaatctcctatgatcgatt

SEQ ID NO: 13313 - RNA, 19 nt, synthetic construct
  source 1..19: mol_type = other RNA
attcactgctagcaagtca

SEQ ID NO: 13314 - RNA, 19 nt, synthetic construct
  source 1..19: mol_type = other RNA
attcactgctagcaagtca

SEQ ID NO: 13315 - RNA, 19 nt, synthetic construct
  source 1..19: mol_type = other RNA
attcactgctagcaagtca

SEQ ID NO: 13316 - RNA, 19 nt, synthetic construct
  source 1..19: mol_type = other RNA
attcactgctagcaagtca

SEQ ID NO: 13317 - RNA, 19 nt, synthetic construct
  source 1..19: mol_type = other RNA
tggaatctcctatgatcga

SEQ ID NO: 13318 - RNA, 19 nt, synthetic construct
  source 1..19: mol_type = other RNA
tggaatctcctatgatcga

SEQ ID NO: 13319 - RNA, 18 nt, synthetic construct
  source 1..18: mol_type = other RNA
attcactgctagcaagtc

SEQ ID NO: 13320 - RNA, 18 nt, synthetic construct
  source 1..18: mol_type = other RNA
attcactgctagcaagtc

SEQ ID NO: 13321 - RNA, 18 nt, synthetic construct
  source 1..18: mol_type = other RNA
attcactgctagcaagtc

SEQ ID NO: 13322 - RNA, 18 nt, synthetic construct
  source 1..18: mol_type = other RNA
attcactgctagcaagtc

SEQ ID NO: 13323 - RNA, 18 nt, synthetic construct
  source 1..18: mol_type = other RNA
tggaatctcctatgatcg

SEQ ID NO: 13324 - RNA, 18 nt, synthetic construct
  source 1..18: mol_type = other RNA
tggaatctcctatgatcg

SEQ ID NO: 13325 - RNA, 21 nt, synthetic construct
  source 1..21: mol_type = other RNA
aaactgatagctgagtccatt

SEQ ID NO: 13326 - RNA, 21 nt, synthetic construct
  source 1..21: mol_type = other RNA
ttgtgacatggatgaatcatt

SEQ ID NO: 13327 - RNA, 21 nt, synthetic construct
  source 1..21: mol_type = other RNA
agaatacagtgttggtcgatt

SEQ ID NO: 13328 - RNA, 21 nt, synthetic construct
  source 1..21: mol_type = other RNA
aatacagtgttggtcgatatt

SEQ ID NO: 13329 - RNA, 21 nt, synthetic construct
  source 1..21: mol_type = other RNA
atacagtgttggtcgatgatt

SEQ ID NO: 13330 - RNA, 21 nt, synthetic construct
  source 1..21: mol_type = other RNA
tacagtgttggtcgatgtatt

SEQ ID NO: 13331 - RNA, 21 nt, synthetic construct
  source 1..21: mol_type = other RNA
atgtaagcacacaagtgaatt

SEQ ID NO: 13332 - RNA, 21 nt, synthetic construct
  source 1..21: mol_type = other RNA
tttttcaaccccagtatcatt

SEQ ID NO: 13333 - RNA, 21 nt, synthetic construct
  source 1..21: mol_type = other RNA
ctttttattcaagagcgaatt

SEQ ID NO: 13334 - RNA, 21 nt, synthetic construct
  source 1..21: mol_type = other RNA
tattcaagagcgagatgtatt

SEQ ID NO: 13335 - RNA, 21 nt, synthetic construct
  source 1..21: mol_type = other RNA
cattgcttcaggcaataaatt

SEQ ID NO: 13336 - RNA, 21 nt, synthetic construct
  source 1..21: mol_type = other RNA
aattacttcgacagcagcatt

SEQ ID NO: 13337 - RNA, 21 nt, synthetic construct
  source 1..21: mol_type = other RNA
attacttcgacagcagcaatt

SEQ ID NO: 13338 - RNA, 21 nt, synthetic construct
  source 1..21: mol_type = other RNA
cttttgtcagttgtggtaatt

SEQ ID NO: 13339 - RNA, 21 nt, synthetic construct
  source 1..21: mol_type = other RNA
cttgataatacctgttggatt

SEQ ID NO: 13340 - RNA, 21 nt, synthetic construct
  source 1..21: mol_type = other RNA
tgataatacctgttggaaatt

SEQ ID NO: 13341 - RNA, 21 nt, synthetic construct
  source 1..21: mol_type = other RNA
aagaggtgttattagaatatt

SEQ ID NO: 13342 - RNA, 21 nt, synthetic construct
  source 1..21: mol_type = other RNA
tgttacgaaaaaactatgatt

SEQ ID NO: 13343 - RNA, 21 nt, synthetic construct
  source 1..21: mol_type = other RNA
atctggctgagcatattcatt

SEQ ID NO: 13344 - RNA, 21 nt, synthetic construct
  source 1..21: mol_type = other RNA
ctattcactgctagcaagatt

SEQ ID NO: 13345 - RNA, 21 nt, synthetic construct
  source 1..21: mol_type = other RNA
tagtaatgcatgccatacatt

SEQ ID NO: 13346 - RNA, 21 nt, synthetic construct
  source 1..21: mol_type = other RNA
aatggggtacttcatgtcatt

SEQ ID NO: 13347 - RNA, 21 nt, synthetic construct
  source 1..21: mol_type = other RNA
aggaaagtttatccagtaatt

SEQ ID NO: 13348 - RNA, 21 nt, synthetic construct
  source 1..21: mol_type = other RNA
tctgcaaaagttgcacaaatt

SEQ ID NO: 13349 - RNA, 19 nt, synthetic construct
  source 1..19: mol_type = other RNA
aaactgatagctgagtcca

SEQ ID NO: 13350 - RNA, 19 nt, synthetic construct
  source 1..19: mol_type = other RNA
ttgtgacatggatgaatca

SEQ ID NO: 13351 - RNA, 19 nt, synthetic construct
  source 1..19: mol_type = other RNA
agaatacagtgttggtcga

SEQ ID NO: 13352 - RNA, 19 nt, synthetic construct
  source 1..19: mol_type = other RNA
aatacagtgttggtcgata

SEQ ID NO: 13353 - RNA, 19 nt, synthetic construct
  source 1..19: mol_type = other RNA
atacagtgttggtcgatga

SEQ ID NO: 13354 - RNA, 19 nt, synthetic construct
  source 1..19: mol_type = other RNA
tacagtgttggtcgatgta

SEQ ID NO: 13355 - RNA, 19 nt, synthetic construct
  source 1..19: mol_type = other RNA
atgtaagcacacaagtgaa

SEQ ID NO: 13356 - RNA, 19 nt, synthetic construct
  source 1..19: mol_type = other RNA
tttttcaaccccagtatca

SEQ ID NO: 13357 - RNA, 19 nt, synthetic construct
  source 1..19: mol_type = other RNA
ctttttattcaagagcgaa

SEQ ID NO: 13358 - RNA, 19 nt, synthetic construct
  source 1..19: mol_type = other RNA
tattcaagagcgagatgta

SEQ ID NO: 13359 - RNA, 19 nt, synthetic construct
  source 1..19: mol_type = other RNA
cattgcttcaggcaataaa

SEQ ID NO: 13360 - RNA, 19 nt, synthetic construct
  source 1..19: mol_type = other RNA
aattacttcgacagcagca

SEQ ID NO: 13361 - RNA, 19 nt, synthetic construct
  source 1..19: mol_type = other RNA
attacttcgacagcagcaa

SEQ ID NO: 13362 - RNA, 19 nt, synthetic construct
  source 1..19: mol_type = other RNA
cttttgtcagttgtggtaa

SEQ ID NO: 13363 - RNA, 19 nt, synthetic construct
  source 1..19: mol_type = other RNA
cttgataatacctgttgga

SEQ ID NO: 13364 - RNA, 19 nt, synthetic construct
  source 1..19: mol_type = other RNA
tgataatacctgttggaaa

SEQ ID NO: 13365 - RNA, 19 nt, synthetic construct
  source 1..19: mol_type = other RNA
aagaggtgttattagaata

SEQ ID NO: 13366 - RNA, 19 nt, synthetic construct
  source 1..19: mol_type = other RNA
tgttacgaaaaaactatga

SEQ ID NO: 13367 - RNA, 19 nt, synthetic construct
  source 1..19: mol_type = other RNA
atctggctgagcatattca

SEQ ID NO: 13368 - RNA, 19 nt, synthetic construct
  source 1..19: mol_type = other RNA
ctattcactgctagcaaga

SEQ ID NO: 13369 - RNA, 19 nt, synthetic construct
  source 1..19: mol_type = other RNA
tagtaatgcatgccataca

SEQ ID NO: 13370 - RNA, 19 nt, synthetic construct
  source 1..19: mol_type = other RNA
aatggggtacttcatgtca

SEQ ID NO: 13371 - RNA, 19 nt, synthetic construct
  source 1..19: mol_type = other RNA
aggaaagtttatccagtaa

SEQ ID NO: 13372 - RNA, 19 nt, synthetic construct
  source 1..19: mol_type = other RNA
tctgcaaaagttgcacaaa

SEQ ID NO: 13373 - RNA, 18 nt, synthetic construct
  source 1..18: mol_type = other RNA
aaactgatagctgagtcc

SEQ ID NO: 13374 - RNA, 18 nt, synthetic construct
  source 1..18: mol_type = other RNA
ttgtgacatggatgaatc

SEQ ID NO: 13375 - RNA, 18 nt, synthetic construct
  source 1..18: mol_type = other RNA
agaatacagtgttggtcg

SEQ ID NO: 13376 - RNA, 18 nt, synthetic construct
  source 1..18: mol_type = other RNA
aatacagtgttggtcgat

SEQ ID NO: 13377 - RNA, 18 nt, synthetic construct
  source 1..18: mol_type = other RNA
atacagtgttggtcgatg

SEQ ID NO: 13378 - RNA, 18 nt, synthetic construct
  source 1..18: mol_type = other RNA
tacagtgttggtcgatgt

SEQ ID NO: 13379 - RNA, 18 nt, synthetic construct
  source 1..18: mol_type = other RNA
atgtaagcacacaagtga

SEQ ID NO: 13380 - RNA, 18 nt, synthetic construct
  source 1..18: mol_type = other RNA
tttttcaaccccagtatc

SEQ ID NO: 13381 - RNA, 18 nt, synthetic construct
  source 1..18: mol_type = other RNA
ctttttattcaagagcga

SEQ ID NO: 13382 - RNA, 18 nt, synthetic construct
  source 1..18: mol_type = other RNA
tattcaagagcgagatgt

SEQ ID NO: 13383 - RNA, 18 nt, synthetic construct
  source 1..18: mol_type = other RNA
cattgcttcaggcaataa

SEQ ID NO: 13384 - RNA, 18 nt, synthetic construct
  source 1..18: mol_type = other RNA
aattacttcgacagcagc

SEQ ID NO: 13385 - RNA, 18 nt, synthetic construct
  source 1..18: mol_type = other RNA
attacttcgacagcagca

SEQ ID NO: 13386 - RNA, 18 nt, synthetic construct
  source 1..18: mol_type = other RNA
cttttgtcagttgtggta

SEQ ID NO: 13387 - RNA, 18 nt, synthetic construct
  source 1..18: mol_type = other RNA
cttgataatacctgttgg

SEQ ID NO: 13388 - RNA, 18 nt, synthetic construct
  source 1..18: mol_type = other RNA
tgataatacctgttggaa

SEQ ID NO: 13389 - RNA, 18 nt, synthetic construct
  source 1..18: mol_type = other RNA
aagaggtgttattagaat

SEQ ID NO: 13390 - RNA, 18 nt, synthetic construct
  source 1..18: mol_type = other RNA
tgttacgaaaaaactatg

SEQ ID NO: 13391 - RNA, 18 nt, synthetic construct
  source 1..18: mol_type = other RNA
atctggctgagcatattc

SEQ ID NO: 13392 - RNA, 18 nt, synthetic construct
  source 1..18: mol_type = other RNA
ctattcactgctagcaag

SEQ ID NO: 13393 - RNA, 18 nt, synthetic construct
  source 1..18: mol_type = other RNA
tagtaatgcatgccatac

SEQ ID NO: 13394 - RNA, 18 nt, synthetic construct
  source 1..18: mol_type = other RNA
aatggggtacttcatgtc

SEQ ID NO: 13395 - RNA, 18 nt, synthetic construct
  source 1..18: mol_type = other RNA
aggaaagtttatccagta

SEQ ID NO: 13396 - RNA, 18 nt, synthetic construct
  source 1..18: mol_type = other RNA
tctgcaaaagttgcacaa

SEQ ID NO: 13397 - RNA, 21 nt, synthetic construct
  source 1..21: mol_type = other RNA
caatagacgtttcttatcatt

SEQ ID NO: 13398 - RNA, 21 nt, synthetic construct
  source 1..21: mol_type = other RNA
caatagacgtttcttatcatt

SEQ ID NO: 13399 - RNA, 19 nt, synthetic construct
  source 1..19: mol_type = other RNA
caatagacgtttcttatca

SEQ ID NO: 13400 - RNA, 19 nt, synthetic construct
  source 1..19: mol_type = other RNA
caatagacgtttcttatca

SEQ ID NO: 13401 - RNA, 18 nt, synthetic construct
  source 1..18: mol_type = other RNA
caatagacgtttcttatc

SEQ ID NO: 13402 - RNA, 18 nt, synthetic construct
  source 1..18: mol_type = other RNA
caatagacgtttcttatc

SEQ ID NO: 13403 - RNA, 21 nt, synthetic construct
  source 1..21: mol_type = other RNA
tccaacactgtattctgattt

SEQ ID NO: 13404 - RNA, 21 nt, synthetic construct
  source 1..21: mol_type = other RNA
ttcgaccaacactgtattctt

SEQ ID NO: 13405 - RNA, 21 nt, synthetic construct
  source 1..21: mol_type = other RNA
tcattccgcaaacccaaagtt

SEQ ID NO: 13406 - RNA, 21 nt, synthetic construct
  source 1..21: mol_type = other RNA
ttggcaaacatgcccttattt

SEQ ID NO: 13407 - RNA, 21 nt, synthetic construct
  source 1..21: mol_type = other RNA
tttcgtctcagttgcagcttt

SEQ ID NO: 13408 - RNA, 21 nt, synthetic construct
  source 1..21: mol_type = other RNA
tgatctatgaactggtagatt

SEQ ID NO: 13409 - RNA, 21 nt, synthetic construct
  source 1..21: mol_type = other RNA
tggatctatgaactggtagtt

SEQ ID NO: 13410 - RNA, 21 nt, synthetic construct
  source 1..21: mol_type = other RNA
tccaagcttatggatcaagtt

SEQ ID NO: 13411 - RNA, 21 nt, synthetic construct
  source 1..21: mol_type = other RNA
ttagagaacatctttccgttt

SEQ ID NO: 13412 - RNA, 21 nt, synthetic construct
  source 1..21: mol_type = other RNA
tcaactatatgcccatggatt

SEQ ID NO: 13413 - RNA, 21 nt, synthetic construct
  source 1..21: mol_type = other RNA
tcgaagtaattcaactatatt

SEQ ID NO: 13414 - RNA, 21 nt, synthetic construct
  source 1..21: mol_type = other RNA
ttcgaagtaattcaactattt

SEQ ID NO: 13415 - RNA, 21 nt, synthetic construct
  source 1..21: mol_type = other RNA
ttgtcgaagtaattcaacttt

SEQ ID NO: 13416 - RNA, 21 nt, synthetic construct
  source 1..21: mol_type = other RNA
tagaattgctgctgtcgaatt

SEQ ID NO: 13417 - RNA, 21 nt, synthetic construct
  source 1..21: mol_type = other RNA
tagagtatctaccacaacttt

SEQ ID NO: 13418 - RNA, 21 nt, synthetic construct
  source 1..21: mol_type = other RNA
tcgatcataggagattccatt

SEQ ID NO: 13419 - RNA, 21 nt, synthetic construct
  source 1..21: mol_type = other RNA
tcattgtagtgaccttcgatt

SEQ ID NO: 13420 - RNA, 21 nt, synthetic construct
  source 1..21: mol_type = other RNA
tcgtaacattctaataacatt

SEQ ID NO: 13421 - RNA, 21 nt, synthetic construct
  source 1..21: mol_type = other RNA
tcggacacaaccatagttttt

SEQ ID NO: 13422 - RNA, 21 nt, synthetic construct
  source 1..21: mol_type = other RNA
ttagctggtaacaacgctttt

SEQ ID NO: 13423 - RNA, 21 nt, synthetic construct
  source 1..21: mol_type = other RNA
tacttgctagcagtgaatatt

SEQ ID NO: 13424 - RNA, 21 nt, synthetic construct
  source 1..21: mol_type = other RNA
tgacttgctagcagtgaattt

SEQ ID NO: 13425 - RNA, 21 nt, synthetic construct
  source 1..21: mol_type = other RNA
tcaatgtgtgtggacataatt

SEQ ID NO: 13426 - RNA, 21 nt, synthetic construct
  source 1..21: mol_type = other RNA
tgcaacatttctttctgtttt

SEQ ID NO: 13427 - RNA, 21 nt, synthetic construct
  source 1..21: mol_type = other RNA
tacaaaactcagaatatattt

SEQ ID NO: 13428 - RNA, 19 nt, synthetic construct
  source 1..19: mol_type = other RNA
tccaacactgtattctgat

SEQ ID NO: 13429 - RNA, 19 nt, synthetic construct
  source 1..19: mol_type = other RNA
ttcgaccaacactgtattc

SEQ ID NO: 13430 - RNA, 19 nt, synthetic construct
  source 1..19: mol_type = other RNA
tcattccgcaaacccaaag

SEQ ID NO: 13431 - RNA, 19 nt, synthetic construct
  source 1..19: mol_type = other RNA
ttggcaaacatgcccttat

SEQ ID NO: 13432 - RNA, 19 nt, synthetic construct
  source 1..19: mol_type = other RNA
tttcgtctcagttgcagct

SEQ ID NO: 13433 - RNA, 19 nt, synthetic construct
  source 1..19: mol_type = other RNA
tgatctatgaactggtaga

SEQ ID NO: 13434 - RNA, 19 nt, synthetic construct
  source 1..19: mol_type = other RNA
tggatctatgaactggtag

SEQ ID NO: 13435 - RNA, 19 nt, synthetic construct
  source 1..19: mol_type = other RNA
tccaagcttatggatcaag

SEQ ID NO: 13436 - RNA, 19 nt, synthetic construct
  source 1..19: mol_type = other RNA
ttagagaacatctttccgt

SEQ ID NO: 13437 - RNA, 19 nt, synthetic construct
  source 1..19: mol_type = other RNA
tcaactatatgcccatgga

SEQ ID NO: 13438 - RNA, 19 nt, synthetic construct
  source 1..19: mol_type = other RNA
tcgaagtaattcaactata

SEQ ID NO: 13439 - RNA, 19 nt, synthetic construct
  source 1..19: mol_type = other RNA
ttcgaagtaattcaactat

SEQ ID NO: 13440 - RNA, 19 nt, synthetic construct
  source 1..19: mol_type = other RNA
ttgtcgaagtaattcaact

SEQ ID NO: 13441 - RNA, 19 nt, synthetic construct
  source 1..19: mol_type = other RNA
tagaattgctgctgtcgaa

SEQ ID NO: 13442 - RNA, 19 nt, synthetic construct
  source 1..19: mol_type = other RNA
tagagtatctaccacaact

SEQ ID NO: 13443 - RNA, 19 nt, synthetic construct
  source 1..19: mol_type = other RNA
tcgatcataggagattcca

SEQ ID NO: 13444 - RNA, 19 nt, synthetic construct
  source 1..19: mol_type = other RNA
tcattgtagtgaccttcga

SEQ ID NO: 13445 - RNA, 19 nt, synthetic construct
  source 1..19: mol_type = other RNA
tcgtaacattctaataaca

SEQ ID NO: 13446 - RNA, 19 nt, synthetic construct
  source 1..19: mol_type = other RNA
tcggacacaaccatagttt

SEQ ID NO: 13447 - RNA, 19 nt, synthetic construct
  source 1..19: mol_type = other RNA
ttagctggtaacaacgctt

SEQ ID NO: 13448 - RNA, 19 nt, synthetic construct
  source 1..19: mol_type = other RNA
tacttgctagcagtgaata

SEQ ID NO: 13449 - RNA, 19 nt, synthetic construct
  source 1..19: mol_type = other RNA
tgacttgctagcagtgaat

SEQ ID NO: 13450 - RNA, 19 nt, synthetic construct
  source 1..19: mol_type = other RNA
tcaatgtgtgtggacataa

SEQ ID NO: 13451 - RNA, 19 nt, synthetic construct
  source 1..19: mol_type = other RNA
tgcaacatttctttctgtt

SEQ ID NO: 13452 - RNA, 19 nt, synthetic construct
  source 1..19: mol_type = other RNA
tacaaaactcagaatatat

SEQ ID NO: 13453 - RNA, 18 nt, synthetic construct
  source 1..18: mol_type = other RNA
ccaacactgtattctgat

SEQ ID NO: 13454 - RNA, 18 nt, synthetic construct
  source 1..18: mol_type = other RNA
tcgaccaacactgtattc

SEQ ID NO: 13455 - RNA, 18 nt, synthetic construct
  source 1..18: mol_type = other RNA
cattccgcaaacccaaag

SEQ ID NO: 13456 - RNA, 18 nt, synthetic construct
  source 1..18: mol_type = other RNA
tggcaaacatgcccttat

SEQ ID NO: 13457 - RNA, 18 nt, synthetic construct
  source 1..18: mol_type = other RNA
ttcgtctcagttgcagct

SEQ ID NO: 13458 - RNA, 18 nt, synthetic construct
  source 1..18: mol_type = other RNA
gatctatgaactggtaga

SEQ ID NO: 13459 - RNA, 18 nt, synthetic construct
  source 1..18: mol_type = other RNA
ggatctatgaactggtag

SEQ ID NO: 13460 - RNA, 18 nt, synthetic construct
  source 1..18: mol_type = other RNA
ccaagcttatggatcaag

SEQ ID NO: 13461 - RNA, 18 nt, synthetic construct
  source 1..18: mol_type = other RNA
tagagaacatctttccgt

SEQ ID NO: 13462 - RNA, 18 nt, synthetic construct
  source 1..18: mol_type = other RNA
caactatatgcccatgga

SEQ ID NO: 13463 - RNA, 18 nt, synthetic construct
  source 1..18: mol_type = other RNA
cgaagtaattcaactata

SEQ ID NO: 13464 - RNA, 18 nt, synthetic construct
  source 1..18: mol_type = other RNA
tcgaagtaattcaactat

SEQ ID NO: 13465 - RNA, 18 nt, synthetic construct
  source 1..18: mol_type = other RNA
tgtcgaagtaattcaact

SEQ ID NO: 13466 - RNA, 18 nt, synthetic construct
  source 1..18: mol_type = other RNA
agaattgctgctgtcgaa

SEQ ID NO: 13467 - RNA, 18 nt, synthetic construct
  source 1..18: mol_type = other RNA
agagtatctaccacaact

SEQ ID NO: 13468 - RNA, 18 nt, synthetic construct
  source 1..18: mol_type = other RNA
cgatcataggagattcca

SEQ ID NO: 13469 - RNA, 18 nt, synthetic construct
  source 1..18: mol_type = other RNA
cattgtagtgaccttcga

SEQ ID NO: 13470 - RNA, 18 nt, synthetic construct
  source 1..18: mol_type = other RNA
cgtaacattctaataaca

SEQ ID NO: 13471 - RNA, 18 nt, synthetic construct
  source 1..18: mol_type = other RNA
cggacacaaccatagttt

SEQ ID NO: 13472 - RNA, 18 nt, synthetic construct
  source 1..18: mol_type = other RNA
tagctggtaacaacgctt

SEQ ID NO: 13473 - RNA, 18 nt, synthetic construct
  source 1..18: mol_type = other RNA
acttgctagcagtgaata

SEQ ID NO: 13474 - RNA, 18 nt, synthetic construct
  source 1..18: mol_type = other RNA
gacttgctagcagtgaat

SEQ ID NO: 13475 - RNA, 18 nt, synthetic construct
  source 1..18: mol_type = other RNA
caatgtgtgtggacataa

SEQ ID NO: 13476 - RNA, 18 nt, synthetic construct
  source 1..18: mol_type = other RNA
gcaacatttctttctgtt

SEQ ID NO: 13477 - RNA, 18 nt, synthetic construct
  source 1..18: mol_type = other RNA
acaaaactcagaatatat

SEQ ID NO: 13478 - RNA, 21 nt, synthetic construct
  source 1..21: mol_type = other RNA
tcggacacaaccatagttttt

SEQ ID NO: 13479 - RNA, 21 nt, synthetic construct
  source 1..21: mol_type = other RNA
tcggacacaaccatagttttt

SEQ ID NO: 13480 - RNA, 21 nt, synthetic construct
  source 1..21: mol_type = other RNA
tcggacacaaccatagttttt

SEQ ID NO: 13481 - RNA, 21 nt, synthetic construct
  source 1..21: mol_type = other RNA
tcggacacaaccatagttttt

SEQ ID NO: 13482 - RNA, 21 nt, synthetic construct
  source 1..21: mol_type = other RNA
tcggacacaaccatagttttt

SEQ ID NO: 13483 - RNA, 21 nt, synthetic construct
  source 1..21: mol_type = other RNA
tcggacacaaccatagttttt

SEQ ID NO: 13484 - RNA, 21 nt, synthetic construct
  source 1..21: mol_type = other RNA
tcggacacaaccatagttttt

SEQ ID NO: 13485 - RNA, 21 nt, synthetic construct
  source 1..21: mol_type = other RNA
tcggacacaaccatagttttt

SEQ ID NO: 13486 - RNA, 21 nt, synthetic construct
  source 1..21: mol_type = other RNA
tcgtaacattctaataacatt

SEQ ID NO: 13487 - RNA, 21 nt, synthetic construct
  source 1..21: mol_type = other RNA
tcgtaacattctaataacatt

SEQ ID NO: 13488 - RNA, 21 nt, synthetic construct
  source 1..21: mol_type = other RNA
tcgtaacattctaataacatt

SEQ ID NO: 13489 - RNA, 21 nt, synthetic construct
  source 1..21: mol_type = other RNA
tcgtaacattctaataacatt

SEQ ID NO: 13490 - RNA, 21 nt, synthetic construct
  source 1..21: mol_type = other RNA
tcgtaacattctaataacatt

SEQ ID NO: 13491 - RNA, 21 nt, synthetic construct
  source 1..21: mol_type = other RNA
tcgtaacattctaataacatt

SEQ ID NO: 13492 - RNA, 21 nt, synthetic construct
  source 1..21: mol_type = other RNA
tcgtaacattctaataacatt

SEQ ID NO: 13493 - RNA, 21 nt, synthetic construct
  source 1..21: mol_type = other RNA
tcgtaacattctaataacatt

SEQ ID NO: 13494 - RNA, 21 nt, synthetic construct
  source 1..21: mol_type = other RNA
tcgtaacattctaataacatt

SEQ ID NO: 13495 - RNA, 19 nt, synthetic construct
  source 1..19: mol_type = other RNA
tcggacacaaccatagttt

SEQ ID NO: 13496 - RNA, 19 nt, synthetic construct
  source 1..19: mol_type = other RNA
tcggacacaaccatagttt

SEQ ID NO: 13497 - RNA, 19 nt, synthetic construct
  source 1..19: mol_type = other RNA
tcggacacaaccatagttt

SEQ ID NO: 13498 - RNA, 19 nt, synthetic construct
  source 1..19: mol_type = other RNA
tcggacacaaccatagttt

SEQ ID NO: 13499 - RNA, 19 nt, synthetic construct
  source 1..19: mol_type = other RNA
tcggacacaaccatagttt

SEQ ID NO: 13500 - RNA, 19 nt, synthetic construct
  source 1..19: mol_type = other RNA
tcggacacaaccatagttt

SEQ ID NO: 13501 - RNA, 19 nt, synthetic construct
  source 1..19: mol_type = other RNA
tcggacacaaccatagttt

SEQ ID NO: 13502 - RNA, 19 nt, synthetic construct
  source 1..19: mol_type = other RNA
tcggacacaaccatagttt

SEQ ID NO: 13503 - RNA, 19 nt, synthetic construct
  source 1..19: mol_type = other RNA
tcgtaacattctaataaca

SEQ ID NO: 13504 - RNA, 19 nt, synthetic construct
  source 1..19: mol_type = other RNA
tcgtaacattctaataaca

SEQ ID NO: 13505 - RNA, 19 nt, synthetic construct
  source 1..19: mol_type = other RNA
tcgtaacattctaataaca

SEQ ID NO: 13506 - RNA, 19 nt, synthetic construct
  source 1..19: mol_type = other RNA
tcgtaacattctaataaca

SEQ ID NO: 13507 - RNA, 19 nt, synthetic construct
  source 1..19: mol_type = other RNA
tcgtaacattctaataaca

SEQ ID NO: 13508 - RNA, 19 nt, synthetic construct
  source 1..19: mol_type = other RNA
tcgtaacattctaataaca

SEQ ID NO: 13509 - RNA, 19 nt, synthetic construct
  source 1..19: mol_type = other RNA
tcgtaacattctaataaca

SEQ ID NO: 13510 - RNA, 19 nt, synthetic construct
  source 1..19: mol_type = other RNA
tcgtaacattctaataaca

SEQ ID NO: 13511 - RNA, 19 nt, synthetic construct
  source 1..19: mol_type = other RNA
tcgtaacattctaataaca

SEQ ID NO: 13512 - RNA, 18 nt, synthetic construct
  source 1..18: mol_type = other RNA
cggacacaaccatagttt

SEQ ID NO: 13513 - RNA, 18 nt, synthetic construct
  source 1..18: mol_type = other RNA
cggacacaaccatagttt

SEQ ID NO: 13514 - RNA, 18 nt, synthetic construct
  source 1..18: mol_type = other RNA
cggacacaaccatagttt

SEQ ID NO: 13515 - RNA, 18 nt, synthetic construct
  source 1..18: mol_type = other RNA
cggacacaaccatagttt

SEQ ID NO: 13516 - RNA, 18 nt, synthetic construct
  source 1..18: mol_type = other RNA
cggacacaaccatagttt

SEQ ID NO: 13517 - RNA, 18 nt, synthetic construct
  source 1..18: mol_type = other RNA
cggacacaaccatagttt

SEQ ID NO: 13518 - RNA, 18 nt, synthetic construct
  source 1..18: mol_type = other RNA
cggacacaaccatagttt

SEQ ID NO: 13519 - RNA, 18 nt, synthetic construct
  source 1..18: mol_type = other RNA
cggacacaaccatagttt

SEQ ID NO: 13520 - RNA, 18 nt, synthetic construct
  source 1..18: mol_type = other RNA
cgtaacattctaataaca

SEQ ID NO: 13521 - RNA, 18 nt, synthetic construct
  source 1..18: mol_type = other RNA
cgtaacattctaataaca

SEQ ID NO: 13522 - RNA, 18 nt, synthetic construct
  source 1..18: mol_type = other RNA
cgtaacattctaataaca

SEQ ID NO: 13523 - RNA, 18 nt, synthetic construct
  source 1..18: mol_type = other RNA
cgtaacattctaataaca

SEQ ID NO: 13524 - RNA, 18 nt, synthetic construct
  source 1..18: mol_type = other RNA
cgtaacattctaataaca

SEQ ID NO: 13525 - RNA, 18 nt, synthetic construct
  source 1..18: mol_type = other RNA
cgtaacattctaataaca

SEQ ID NO: 13526 - RNA, 18 nt, synthetic construct
  source 1..18: mol_type = other RNA
cgtaacattctaataaca

SEQ ID NO: 13527 - RNA, 18 nt, synthetic construct
  source 1..18: mol_type = other RNA
cgtaacattctaataaca

SEQ ID NO: 13528 - RNA, 18 nt, synthetic construct
  source 1..18: mol_type = other RNA
cgtaacattctaataaca

SEQ ID NO: 13529 - RNA, 21 nt, synthetic construct
  source 1..21: mol_type = other RNA
tcgatcataggagattccatt

SEQ ID NO: 13530 - RNA, 21 nt, synthetic construct
  source 1..21: mol_type = other RNA
tcgatcataggagattccatt

SEQ ID NO: 13531 - RNA, 21 nt, synthetic construct
  source 1..21: mol_type = other RNA
tcgatcataggagattccatt

SEQ ID NO: 13532 - RNA, 21 nt, synthetic construct
  source 1..21: mol_type = other RNA
tcgatcataggagattccatt

SEQ ID NO: 13533 - RNA, 21 nt, synthetic construct
  source 1..21: mol_type = other RNA
tcgatcataggagattccatt

SEQ ID NO: 13534 - RNA, 21 nt, synthetic construct
  source 1..21: mol_type = other RNA
tcgatcataggagattccatt

SEQ ID NO: 13535 - RNA, 21 nt, synthetic construct
  source 1..21: mol_type = other RNA
tcgatcataggagattccatt

SEQ ID NO: 13536 - RNA, 21 nt, synthetic construct
  source 1..21: mol_type = other RNA
tcgatcataggagattccatt

SEQ ID NO: 13537 - RNA, 21 nt, synthetic construct
  source 1..21: mol_type = other RNA
tgacttgctagcagtgaattt

SEQ ID NO: 13538 - RNA, 21 nt, synthetic construct
  source 1..21: mol_type = other RNA
tgacttgctagcagtgaattt

SEQ ID NO: 13539 - RNA, 21 nt, synthetic construct
  source 1..21: mol_type = other RNA
tgacttgctagcagtgaattt

SEQ ID NO: 13540 - RNA, 21 nt, synthetic construct
  source 1..21: mol_type = other RNA
tgacttgctagcagtgaattt

SEQ ID NO: 13541 - RNA, 21 nt, synthetic construct
  source 1..21: mol_type = other RNA
tgacttgctagcagtgaattt

SEQ ID NO: 13542 - RNA, 21 nt, synthetic construct
  source 1..21: mol_type = other RNA
tgacttgctagcagtgaattt

SEQ ID NO: 13543 - RNA, 21 nt, synthetic construct
  source 1..21: mol_type = other RNA
tgacttgctagcagtgaattt

SEQ ID NO: 13544 - RNA, 21 nt, synthetic construct
  source 1..21: mol_type = other RNA
tgacttgctagcagtgaattt

SEQ ID NO: 13545 - RNA, 21 nt, synthetic construct
  source 1..21: mol_type = other RNA
tgacttgctagcagtgaattt

SEQ ID NO: 13546 - RNA, 19 nt, synthetic construct
  source 1..19: mol_type = other RNA
tcgatcataggagattcca

SEQ ID NO: 13547 - RNA, 19 nt, synthetic construct
  source 1..19: mol_type = other RNA
tcgatcataggagattcca

SEQ ID NO: 13548 - RNA, 19 nt, synthetic construct
  source 1..19: mol_type = other RNA
tcgatcataggagattcca

SEQ ID NO: 13549 - RNA, 19 nt, synthetic construct
  source 1..19: mol_type = other RNA
tcgatcataggagattcca

SEQ ID NO: 13550 - RNA, 19 nt, synthetic construct
  source 1..19: mol_type = other RNA
tcgatcataggagattcca

SEQ ID NO: 13551 - RNA, 19 nt, synthetic construct
  source 1..19: mol_type = other RNA
tcgatcataggagattcca

SEQ ID NO: 13552 - RNA, 19 nt, synthetic construct
  source 1..19: mol_type = other RNA
tcgatcataggagattcca

SEQ ID NO: 13553 - RNA, 19 nt, synthetic construct
  source 1..19: mol_type = other RNA
tcgatcataggagattcca

SEQ ID NO: 13554 - RNA, 19 nt, synthetic construct
  source 1..19: mol_type = other RNA
tgacttgctagcagtgaat

SEQ ID NO: 13555 - RNA, 19 nt, synthetic construct
  source 1..19: mol_type = other RNA
tgacttgctagcagtgaat

SEQ ID NO: 13556 - RNA, 19 nt, synthetic construct
  source 1..19: mol_type = other RNA
tgacttgctagcagtgaat

SEQ ID NO: 13557 - RNA, 19 nt, synthetic construct
  source 1..19: mol_type = other RNA
tgacttgctagcagtgaat

SEQ ID NO: 13558 - RNA, 19 nt, synthetic construct
  source 1..19: mol_type = other RNA
tgacttgctagcagtgaat

SEQ ID NO: 13559 - RNA, 19 nt, synthetic construct
  source 1..19: mol_type = other RNA
tgacttgctagcagtgaat

SEQ ID NO: 13560 - RNA, 19 nt, synthetic construct
  source 1..19: mol_type = other RNA
tgacttgctagcagtgaat

SEQ ID NO: 13561 - RNA, 19 nt, synthetic construct
  source 1..19: mol_type = other RNA
tgacttgctagcagtgaat

SEQ ID NO: 13562 - RNA, 19 nt, synthetic construct
  source 1..19: mol_type = other RNA
tgacttgctagcagtgaat

SEQ ID NO: 13563 - RNA, 18 nt, synthetic construct
  source 1..18: mol_type = other RNA
cgatcataggagattcca

SEQ ID NO: 13564 - RNA, 18 nt, synthetic construct
  source 1..18: mol_type = other RNA
cgatcataggagattcca

SEQ ID NO: 13565 - RNA, 18 nt, synthetic construct
  source 1..18: mol_type = other RNA
cgatcataggagattcca

SEQ ID NO: 13566 - RNA, 18 nt, synthetic construct
  source 1..18: mol_type = other RNA
cgatcataggagattcca

SEQ ID NO: 13567 - RNA, 18 nt, synthetic construct
  source 1..18: mol_type = other RNA
cgatcataggagattcca

SEQ ID NO: 13568 - RNA, 18 nt, synthetic construct
  source 1..18: mol_type = other RNA
cgatcataggagattcca

SEQ ID NO: 13569 - RNA, 18 nt, synthetic construct
  source 1..18: mol_type = other RNA
cgatcataggagattcca

SEQ ID NO: 13570 - RNA, 18 nt, synthetic construct
  source 1..18: mol_type = other RNA
cgatcataggagattcca

SEQ ID NO: 13571 - RNA, 18 nt, synthetic construct
  source 1..18: mol_type = other RNA
gacttgctagcagtgaat

SEQ ID NO: 13572 - RNA, 18 nt, synthetic construct
  source 1..18: mol_type = other RNA
gacttgctagcagtgaat

SEQ ID NO: 13573 - RNA, 18 nt, synthetic construct
  source 1..18: mol_type = other RNA
gacttgctagcagtgaat

SEQ ID NO: 13574 - RNA, 18 nt, synthetic construct
  source 1..18: mol_type = other RNA
gacttgctagcagtgaat

SEQ ID NO: 13575 - RNA, 18 nt, synthetic construct
  source 1..18: mol_type = other RNA
gacttgctagcagtgaat

SEQ ID NO: 13576 - RNA, 18 nt, synthetic construct
  source 1..18: mol_type = other RNA
gacttgctagcagtgaat

SEQ ID NO: 13577 - RNA, 18 nt, synthetic construct
  source 1..18: mol_type = other RNA
gacttgctagcagtgaat

SEQ ID NO: 13578 - RNA, 18 nt, synthetic construct
  source 1..18: mol_type = other RNA
gacttgctagcagtgaat

SEQ ID NO: 13579 - RNA, 18 nt, synthetic construct
  source 1..18: mol_type = other RNA
gacttgctagcagtgaat

SEQ ID NO: 13580 - RNA, 21 nt, synthetic construct
  source 1..21: mol_type = other RNA
tcaactatatgcccatggatt

SEQ ID NO: 13581 - RNA, 21 nt, synthetic construct
  source 1..21: mol_type = other RNA
tcaactatatgcccatggatt

SEQ ID NO: 13582 - RNA, 21 nt, synthetic construct
  source 1..21: mol_type = other RNA
tcaactatatgcccatggatt

SEQ ID NO: 13583 - RNA, 21 nt, synthetic construct
  source 1..21: mol_type = other RNA
tcaactatatgcccatggatt

SEQ ID NO: 13584 - RNA, 21 nt, synthetic construct
  source 1..21: mol_type = other RNA
tcaactatatgcccatggatt

SEQ ID NO: 13585 - RNA, 21 nt, synthetic construct
  source 1..21: mol_type = other RNA
tcaactatatgcccatggatt

SEQ ID NO: 13586 - RNA, 21 nt, synthetic construct
  source 1..21: mol_type = other RNA
tcaactatatgcccatggatt

SEQ ID NO: 13587 - RNA, 21 nt, synthetic construct
  source 1..21: mol_type = other RNA
tcaactatatgcccatggatt

SEQ ID NO: 13588 - RNA, 21 nt, synthetic construct
  source 1..21: mol_type = other RNA
tacaaaactcagaatatattt

SEQ ID NO: 13589 - RNA, 21 nt, synthetic construct
  source 1..21: mol_type = other RNA
tacaaaactcagaatatattt

SEQ ID NO: 13590 - RNA, 21 nt, synthetic construct
  source 1..21: mol_type = other RNA
tacaaaactcagaatatattt

SEQ ID NO: 13591 - RNA, 21 nt, synthetic construct
  source 1..21: mol_type = other RNA
tacaaaactcagaatatattt

SEQ ID NO: 13592 - RNA, 21 nt, synthetic construct
  source 1..21: mol_type = other RNA
tacaaaactcagaatatattt

SEQ ID NO: 13593 - RNA, 21 nt, synthetic construct
  source 1..21: mol_type = other RNA
tacaaaactcagaatatattt

SEQ ID NO: 13594 - RNA, 21 nt, synthetic construct
  source 1..21: mol_type = other RNA
tacaaaactcagaatatattt

SEQ ID NO: 13595 - RNA, 21 nt, synthetic construct
  source 1..21: mol_type = other RNA
tacaaaactcagaatatattt

SEQ ID NO: 13596 - RNA, 19 nt, synthetic construct
  source 1..19: mol_type = other RNA
tcaactatatgcccatgga

SEQ ID NO: 13597 - RNA, 19 nt, synthetic construct
  source 1..19: mol_type = other RNA
tcaactatatgcccatgga

SEQ ID NO: 13598 - RNA, 19 nt, synthetic construct
  source 1..19: mol_type = other RNA
tcaactatatgcccatgga

SEQ ID NO: 13599 - RNA, 19 nt, synthetic construct
  source 1..19: mol_type = other RNA
tcaactatatgcccatgga

SEQ ID NO: 13600 - RNA, 19 nt, synthetic construct
  source 1..19: mol_type = other RNA
tcaactatatgcccatgga

SEQ ID NO: 13601 - RNA, 19 nt, synthetic construct
  source 1..19: mol_type = other RNA
tcaactatatgcccatgga

SEQ ID NO: 13602 - RNA, 19 nt, synthetic construct
  source 1..19: mol_type = other RNA
tcaactatatgcccatgga

SEQ ID NO: 13603 - RNA, 19 nt, synthetic construct
  source 1..19: mol_type = other RNA
tcaactatatgcccatgga

SEQ ID NO: 13604 - RNA, 19 nt, synthetic construct
  source 1..19: mol_type = other RNA
tacaaaactcagaatatat

SEQ ID NO: 13605 - RNA, 19 nt, synthetic construct
  source 1..19: mol_type = other RNA
tacaaaactcagaatatat

SEQ ID NO: 13606 - RNA, 19 nt, synthetic construct
  source 1..19: mol_type = other RNA
tacaaaactcagaatatat

SEQ ID NO: 13607 - RNA, 19 nt, synthetic construct
  source 1..19: mol_type = other RNA
tacaaaactcagaatatat

SEQ ID NO: 13608 - RNA, 19 nt, synthetic construct
  source 1..19: mol_type = other RNA
tacaaaactcagaatatat

SEQ ID NO: 13609 - RNA, 19 nt, synthetic construct
  source 1..19: mol_type = other RNA
tacaaaactcagaatatat

SEQ ID NO: 13610 - RNA, 19 nt, synthetic construct
  source 1..19: mol_type = other RNA
tacaaaactcagaatatat

SEQ ID NO: 13611 - RNA, 19 nt, synthetic construct
  source 1..19: mol_type = other RNA
tacaaaactcagaatatat

SEQ ID NO: 13612 - RNA, 18 nt, synthetic construct
  source 1..18: mol_type = other RNA
caactatatgcccatgga

SEQ ID NO: 13613 - RNA, 18 nt, synthetic construct
  source 1..18: mol_type = other RNA
caactatatgcccatgga

SEQ ID NO: 13614 - RNA, 18 nt, synthetic construct
  source 1..18: mol_type = other RNA
caactatatgcccatgga

SEQ ID NO: 13615 - RNA, 18 nt, synthetic construct
  source 1..18: mol_type = other RNA
caactatatgcccatgga

SEQ ID NO: 13616 - RNA, 18 nt, synthetic construct
  source 1..18: mol_type = other RNA
caactatatgcccatgga

SEQ ID NO: 13617 - RNA, 18 nt, synthetic construct
  source 1..18: mol_type = other RNA
caactatatgcccatgga

SEQ ID NO: 13618 - RNA, 18 nt, synthetic construct
  source 1..18: mol_type = other RNA
caactatatgcccatgga

SEQ ID NO: 13619 - RNA, 18 nt, synthetic construct
  source 1..18: mol_type = other RNA
caactatatgcccatgga

SEQ ID NO: 13620 - RNA, 18 nt, synthetic construct
  source 1..18: mol_type = other RNA
acaaaactcagaatatat

SEQ ID NO: 13621 - RNA, 18 nt, synthetic construct
  source 1..18: mol_type = other RNA
acaaaactcagaatatat

SEQ ID NO: 13622 - RNA, 18 nt, synthetic construct
  source 1..18: mol_type = other RNA
acaaaactcagaatatat

SEQ ID NO: 13623 - RNA, 18 nt, synthetic construct
  source 1..18: mol_type = other RNA
acaaaactcagaatatat

SEQ ID NO: 13624 - RNA, 18 nt, synthetic construct
  source 1..18: mol_type = other RNA
acaaaactcagaatatat

SEQ ID NO: 13625 - RNA, 18 nt, synthetic construct
  source 1..18: mol_type = other RNA
acaaaactcagaatatat

SEQ ID NO: 13626 - RNA, 18 nt, synthetic construct
  source 1..18: mol_type = other RNA
acaaaactcagaatatat

SEQ ID NO: 13627 - RNA, 18 nt, synthetic construct
  source 1..18: mol_type = other RNA
acaaaactcagaatatat

SEQ ID NO: 13628 - RNA, 21 nt, synthetic construct
  source 1..21: mol_type = other RNA
tgacttgctagcagtgaattt

SEQ ID NO: 13629 - RNA, 21 nt, synthetic construct
  source 1..21: mol_type = other RNA
tgacttgctagcagtgaattt

SEQ ID NO: 13630 - RNA, 21 nt, synthetic construct
  source 1..21: mol_type = other RNA
tgacttgctagcagtgaattt

SEQ ID NO: 13631 - RNA, 21 nt, synthetic construct
  source 1..21: mol_type = other RNA
tgacttgctagcagtgaattt

SEQ ID NO: 13632 - RNA, 21 nt, synthetic construct
  source 1..21: mol_type = other RNA
tcgatcataggagattccatt

SEQ ID NO: 13633 - RNA, 21 nt, synthetic construct
  source 1..21: mol_type = other RNA
tcgatcataggagattccatt

SEQ ID NO: 13634 - RNA, 19 nt, synthetic construct
  source 1..19: mol_type = other RNA
tgacttgctagcagtgaat

SEQ ID NO: 13635 - RNA, 19 nt, synthetic construct
  source 1..19: mol_type = other RNA
tgacttgctagcagtgaat

SEQ ID NO: 13636 - RNA, 19 nt, synthetic construct
  source 1..19: mol_type = other RNA
tgacttgctagcagtgaat

SEQ ID NO: 13637 - RNA, 19 nt, synthetic construct
  source 1..19: mol_type = other RNA
tgacttgctagcagtgaat

SEQ ID NO: 13638 - RNA, 19 nt, synthetic construct
  source 1..19: mol_type = other RNA
tcgatcataggagattcca

SEQ ID NO: 13639 - RNA, 19 nt, synthetic construct
  source 1..19: mol_type = other RNA
tcgatcataggagattcca

SEQ ID NO: 13640 - RNA, 18 nt, synthetic construct
  source 1..18: mol_type = other RNA
gacttgctagcagtgaat

SEQ ID NO: 13641 - RNA, 18 nt, synthetic construct
  source 1..18: mol_type = other RNA
gacttgctagcagtgaat

SEQ ID NO: 13642 - RNA, 18 nt, synthetic construct
  source 1..18: mol_type = other RNA
gacttgctagcagtgaat

SEQ ID NO: 13643 - RNA, 18 nt, synthetic construct
  source 1..18: mol_type = other RNA
gacttgctagcagtgaat

SEQ ID NO: 13644 - RNA, 18 nt, synthetic construct
  source 1..18: mol_type = other RNA
cgatcataggagattcca

SEQ ID NO: 13645 - RNA, 18 nt, synthetic construct
  source 1..18: mol_type = other RNA
cgatcataggagattcca

SEQ ID NO: 13646 - RNA, 21 nt, synthetic construct
  source 1..21: mol_type = other RNA
tggactcagctatcagttttt

SEQ ID NO: 13647 - RNA, 21 nt, synthetic construct
  source 1..21: mol_type = other RNA
tgattcatccatgtcacaatt

SEQ ID NO: 13648 - RNA, 21 nt, synthetic construct
  source 1..21: mol_type = other RNA
tcgaccaacactgtattcttt

SEQ ID NO: 13649 - RNA, 21 nt, synthetic construct
  source 1..21: mol_type = other RNA
tatcgaccaacactgtatttt

SEQ ID NO: 13650 - RNA, 21 nt, synthetic construct
  source 1..21: mol_type = other RNA
tcatcgaccaacactgtattt

SEQ ID NO: 13651 - RNA, 21 nt, synthetic construct
  source 1..21: mol_type = other RNA
tacatcgaccaacactgtatt

SEQ ID NO: 13652 - RNA, 21 nt, synthetic construct
  source 1..21: mol_type = other RNA
ttcacttgtgtgcttacattt

SEQ ID NO: 13653 - RNA, 21 nt, synthetic construct
  source 1..21: mol_type = other RNA
tgatactggggttgaaaaatt

SEQ ID NO: 13654 - RNA, 21 nt, synthetic construct
  source 1..21: mol_type = other RNA
ttcgctcttgaataaaaagtt

SEQ ID NO: 13655 - RNA, 21 nt, synthetic construct
  source 1..21: mol_type = other RNA
tacatctcgctcttgaatatt

SEQ ID NO: 13656 - RNA, 21 nt, synthetic construct
  source 1..21: mol_type = other RNA
tttattgcctgaagcaatgtt

SEQ ID NO: 13657 - RNA, 21 nt, synthetic construct
  source 1..21: mol_type = other RNA
tgctgctgtcgaagtaatttt

SEQ ID NO: 13658 - RNA, 21 nt, synthetic construct
  source 1..21: mol_type = other RNA
ttgctgctgtcgaagtaattt

SEQ ID NO: 13659 - RNA, 21 nt, synthetic construct
  source 1..21: mol_type = other RNA
ttaccacaactgacaaaagtt

SEQ ID NO: 13660 - RNA, 21 nt, synthetic construct
  source 1..21: mol_type = other RNA
tccaacaggtattatcaagtt

SEQ ID NO: 13661 - RNA, 21 nt, synthetic construct
  source 1..21: mol_type = other RNA
tttccaacaggtattatcatt

SEQ ID NO: 13662 - RNA, 21 nt, synthetic construct
  source 1..21: mol_type = other RNA
tattctaataacacctctttt

SEQ ID NO: 13663 - RNA, 21 nt, synthetic construct
  source 1..21: mol_type = other RNA
tcatagttttttcgtaacatt

SEQ ID NO: 13664 - RNA, 21 nt, synthetic construct
  source 1..21: mol_type = other RNA
tgaatatgctcagccagattt

SEQ ID NO: 13665 - RNA, 21 nt, synthetic construct
  source 1..21: mol_type = other RNA
tcttgctagcagtgaatagtt

SEQ ID NO: 13666 - RNA, 21 nt, synthetic construct
  source 1..21: mol_type = other RNA
tgtatggcatgcattactatt

SEQ ID NO: 13667 - RNA, 21 nt, synthetic construct
  source 1..21: mol_type = other RNA
tgacatgaagtaccccatttt

SEQ ID NO: 13668 - RNA, 21 nt, synthetic construct
  source 1..21: mol_type = other RNA
ttactggataaactttccttt

SEQ ID NO: 13669 - RNA, 21 nt, synthetic construct
  source 1..21: mol_type = other RNA
tttgtgcaacttttgcagatt

SEQ ID NO: 13670 - RNA, 19 nt, synthetic construct
  source 1..19: mol_type = other RNA
tggactcagctatcagttt

SEQ ID NO: 13671 - RNA, 19 nt, synthetic construct
  source 1..19: mol_type = other RNA
tgattcatccatgtcacaa

SEQ ID NO: 13672 - RNA, 19 nt, synthetic construct
  source 1..19: mol_type = other RNA
tcgaccaacactgtattct

SEQ ID NO: 13673 - RNA, 19 nt, synthetic construct
  source 1..19: mol_type = other RNA
tatcgaccaacactgtatt

SEQ ID NO: 13674 - RNA, 19 nt, synthetic construct
  source 1..19: mol_type = other RNA
tcatcgaccaacactgtat

SEQ ID NO: 13675 - RNA, 19 nt, synthetic construct
  source 1..19: mol_type = other RNA
tacatcgaccaacactgta

SEQ ID NO: 13676 - RNA, 19 nt, synthetic construct
  source 1..19: mol_type = other RNA
ttcacttgtgtgcttacat

SEQ ID NO: 13677 - RNA, 19 nt, synthetic construct
  source 1..19: mol_type = other RNA
tgatactggggttgaaaaa

SEQ ID NO: 13678 - RNA, 19 nt, synthetic construct
  source 1..19: mol_type = other RNA
ttcgctcttgaataaaaag

SEQ ID NO: 13679 - RNA, 19 nt, synthetic construct
  source 1..19: mol_type = other RNA
tacatctcgctcttgaata

SEQ ID NO: 13680 - RNA, 19 nt, synthetic construct
  source 1..19: mol_type = other RNA
tttattgcctgaagcaatg

SEQ ID NO: 13681 - RNA, 19 nt, synthetic construct
  source 1..19: mol_type = other RNA
tgctgctgtcgaagtaatt

SEQ ID NO: 13682 - RNA, 19 nt, synthetic construct
  source 1..19: mol_type = other RNA
ttgctgctgtcgaagtaat

SEQ ID NO: 13683 - RNA, 19 nt, synthetic construct
  source 1..19: mol_type = other RNA
ttaccacaactgacaaaag

SEQ ID NO: 13684 - RNA, 19 nt, synthetic construct
  source 1..19: mol_type = other RNA
tccaacaggtattatcaag

SEQ ID NO: 13685 - RNA, 19 nt, synthetic construct
  source 1..19: mol_type = other RNA
tttccaacaggtattatca

SEQ ID NO: 13686 - RNA, 19 nt, synthetic construct
  source 1..19: mol_type = other RNA
tattctaataacacctctt

SEQ ID NO: 13687 - RNA, 19 nt, synthetic construct
  source 1..19: mol_type = other RNA
tcatagttttttcgtaaca

SEQ ID NO: 13688 - RNA, 19 nt, synthetic construct
  source 1..19: mol_type = other RNA
tgaatatgctcagccagat

SEQ ID NO: 13689 - RNA, 19 nt, synthetic construct
  source 1..19: mol_type = other RNA
tcttgctagcagtgaatag

SEQ ID NO: 13690 - RNA, 19 nt, synthetic construct
  source 1..19: mol_type = other RNA
tgtatggcatgcattacta

SEQ ID NO: 13691 - RNA, 19 nt, synthetic construct
  source 1..19: mol_type = other RNA
tgacatgaagtaccccatt

SEQ ID NO: 13692 - RNA, 19 nt, synthetic construct
  source 1..19: mol_type = other RNA
ttactggataaactttcct

SEQ ID NO: 13693 - RNA, 19 nt, synthetic construct
  source 1..19: mol_type = other RNA
tttgtgcaacttttgcaga

SEQ ID NO: 13694 - RNA, 18 nt, synthetic construct
  source 1..18: mol_type = other RNA
ggactcagctatcagttt

SEQ ID NO: 13695 - RNA, 18 nt, synthetic construct
  source 1..18: mol_type = other RNA
gattcatccatgtcacaa

SEQ ID NO: 13696 - RNA, 18 nt, synthetic construct
  source 1..18: mol_type = other RNA
cgaccaacactgtattct

SEQ ID NO: 13697 - RNA, 18 nt, synthetic construct
  source 1..18: mol_type = other RNA
atcgaccaacactgtatt

SEQ ID NO: 13698 - RNA, 18 nt, synthetic construct
  source 1..18: mol_type = other RNA
catcgaccaacactgtat

SEQ ID NO: 13699 - RNA, 18 nt, synthetic construct
  source 1..18: mol_type = other RNA
acatcgaccaacactgta

SEQ ID NO: 13700 - RNA, 18 nt, synthetic construct
  source 1..18: mol_type = other RNA
tcacttgtgtgcttacat

SEQ ID NO: 13701 - RNA, 18 nt, synthetic construct
  source 1..18: mol_type = other RNA
gatactggggttgaaaaa

SEQ ID NO: 13702 - RNA, 18 nt, synthetic construct
  source 1..18: mol_type = other RNA
tcgctcttgaataaaaag

SEQ ID NO: 13703 - RNA, 18 nt, synthetic construct
  source 1..18: mol_type = other RNA
acatctcgctcttgaata

SEQ ID NO: 13704 - RNA, 18 nt, synthetic construct
  source 1..18: mol_type = other RNA
ttattgcctgaagcaatg

SEQ ID NO: 13705 - RNA, 18 nt, synthetic construct
  source 1..18: mol_type = other RNA
gctgctgtcgaagtaatt

SEQ ID NO: 13706 - RNA, 18 nt, synthetic construct
  source 1..18: mol_type = other RNA
tgctgctgtcgaagtaat

SEQ ID NO: 13707 - RNA, 18 nt, synthetic construct
  source 1..18: mol_type = other RNA
taccacaactgacaaaag

SEQ ID NO: 13708 - RNA, 18 nt, synthetic construct
  source 1..18: mol_type = other RNA
ccaacaggtattatcaag

SEQ ID NO: 13709 - RNA, 18 nt, synthetic construct
  source 1..18: mol_type = other RNA
ttccaacaggtattatca

SEQ ID NO: 13710 - RNA, 18 nt, synthetic construct
  source 1..18: mol_type = other RNA
attctaataacacctctt

SEQ ID NO: 13711 - RNA, 18 nt, synthetic construct
  source 1..18: mol_type = other RNA
catagttttttcgtaaca

SEQ ID NO: 13712 - RNA, 18 nt, synthetic construct
  source 1..18: mol_type = other RNA
gaatatgctcagccagat

SEQ ID NO: 13713 - RNA, 18 nt, synthetic construct
  source 1..18: mol_type = other RNA
cttgctagcagtgaatag

SEQ ID NO: 13714 - RNA, 18 nt, synthetic construct
  source 1..18: mol_type = other RNA
gtatggcatgcattacta

SEQ ID NO: 13715 - RNA, 18 nt, synthetic construct
  source 1..18: mol_type = other RNA
gacatgaagtaccccatt

SEQ ID NO: 13716 - RNA, 18 nt, synthetic construct
  source 1..18: mol_type = other RNA
tactggataaactttcct

SEQ ID NO: 13717 - RNA, 18 nt, synthetic construct
  source 1..18: mol_type = other RNA
ttgtgcaacttttgcaga

SEQ ID NO: 13718 - RNA, 21 nt, synthetic construct
  source 1..21: mol_type = other RNA
tgataagaaacgtctattgtt

SEQ ID NO: 13719 - RNA, 21 nt, synthetic construct
  source 1..21: mol_type = other RNA
tgataagaaacgtctattgtt

SEQ ID NO: 13720 - RNA, 19 nt, synthetic construct
  source 1..19: mol_type = other RNA
tgataagaaacgtctattg

SEQ ID NO: 13721 - RNA, 19 nt, synthetic construct
  source 1..19: mol_type = other RNA
tgataagaaacgtctattg

SEQ ID NO: 13722 - RNA, 18 nt, synthetic construct
  source 1..18: mol_type = other RNA
gataagaaacgtctattg

SEQ ID NO: 13723 - RNA, 18 nt, synthetic construct
  source 1..18: mol_type = other RNA
gataagaaacgtctattg

SEQ ID NO: 13724 - RNA, 21 nt, synthetic construct
  source 1..21: mol_type = other RNA
  misc_feature 1: note = ETL17 moiety with a phosphorothioate linkage
  modified_base 1: mod_base = OTHER; note = 2'-O-methyl modified nucleoside
  modified_base 2: mod_base = OTHER; note = 2'-O-methyl modified nucleoside
  modified_base 3: mod_base = OTHER; note = 2'-O-methyl modified nucleoside
  modified_base 4: mod_base = OTHER; note = 2'-methoxy ethyl thymidine
  modified_base 5: mod_base = OTHER; note = 2'-O-methyl modified nucleoside
  modified_base 6: mod_base = OTHER; note = 2'-O-methyl modified nucleoside
  modified_base 7: mod_base = OTHER; note = 2'-fluoro-modified nucleoside
  modified_base 8: mod_base = OTHER; note = 2'-fluoro-modified nucleoside
  modified_base 9: mod_base = OTHER; note = 2'-fluoro-modified nucleoside
  modified_base 10: mod_base = OTHER; note = 2'-fluoro-modified nucleoside
  modified_base 11: mod_base = OTHER; note = 2'-O-methyl modified nucleoside
  modified_base 12: mod_base = OTHER; note = 2'-O-methyl modified nucleoside
  modified_base 13: mod_base = OTHER; note = 2'-methoxy ethyl nucleoside
  modified_base 14: mod_base = OTHER; note = 2'-O-methyl modified nucleoside
  modified_base 15: mod_base = OTHER; note = 2'-O-methyl modified nucleoside
  modified_base 16: mod_base = OTHER; note = 2'-O-methyl modified nucleoside
  modified_base 17: mod_base = OTHER; note = 2'-O-methyl modified nucleoside
  modified_base 18: mod_base = OTHER; note = 2'-O-methyl modified nucleoside
  modified_base 19: mod_base = OTHER; note = 2'-O-methyl modified nucleoside with phosphorothioate linkage
  modified_base 20: mod_base = OTHER; note = 2'-O-methyl modified nucleoside with phosphorothioate linkage
  modified_base 21: mod_base = OTHER; note = 2'-O-methyl modified nucleoside
tattcaagagcgagatgtatt

SEQ ID NO: 13725 - RNA, 21 nt, synthetic construct
  source 1..21: mol_type = other RNA
  misc_feature 1: note = ETL17 moiety with a phosphorothioate linkage
  modified_base 1: mod_base = OTHER; note = 2'-O-methyl modified nucleoside
  modified_base 2: mod_base = OTHER; note = 2'-O-methyl modified nucleoside
  modified_base 3: mod_base = OTHER; note = 2'-O-methyl modified nucleoside
  modified_base 4: mod_base = OTHER; note = 2'-methoxy ethyl thymidine
  modified_base 5: mod_base = OTHER; note = 2'-fluoro-modified nucleoside
  modified_base 6: mod_base = OTHER; note = 2'-O-methyl modified nucleoside
  modified_base 7: mod_base = OTHER; note = 2'-fluoro-modified nucleoside
  modified_base 8: mod_base = OTHER; note = 2'-fluoro-modified nucleoside
  modified_base 9: mod_base = OTHER; note = 2'-fluoro-modified nucleoside
  modified_base 10: mod_base = OTHER; note = 2'-fluoro-modified nucleoside
  modified_base 11: mod_base = OTHER; note = 2'-O-methyl modified nucleoside
  modified_base 12: mod_base = OTHER; note = 2'-O-methyl modified nucleoside
  modified_base 13: mod_base = OTHER; note = 2'-methoxy ethyl nucleoside
  modified_base 14: mod_base = OTHER; note = 2'-O-methyl modified nucleoside
  modified_base 15: mod_base = OTHER; note = 2'-O-methyl modified nucleoside
  modified_base 16: mod_base = OTHER; note = 2'-O-methyl modified nucleoside
  modified_base 17: mod_base = OTHER; note = 2'-O-methyl modified nucleoside
  modified_base 18: mod_base = OTHER; note = 2'-O-methyl modified nucleoside
  modified_base 19: mod_base = OTHER; note = 2'-O-methyl modified nucleoside with phosphorothioate linkage
  modified_base 20: mod_base = OTHER; note = 2'-O-methyl modified nucleoside with phosphorothioate linkage
  modified_base 21: mod_base = OTHER; note = 2'-O-methyl modified nucleoside
tattcaagagcgagatgtatt

SEQ ID NO: 13726 - RNA, 21 nt, synthetic construct
  source 1..21: mol_type = other RNA
  misc_feature 1: note = ETL17 moiety with a phosphorothioate linkage
  modified_base 1: mod_base = OTHER; note = 2'-O-methyl modified nucleoside
  modified_base 2: mod_base = OTHER; note = 2'-O-methyl modified nucleoside
  modified_base 3: mod_base = OTHER; note = 2'-O-methyl modified nucleoside
  modified_base 4: mod_base = OTHER; note = 2'-methoxy ethyl thymidine
  modified_base 5: mod_base = OTHER; note = 2'-O-methyl modified nucleoside
  modified_base 6: mod_base = OTHER; note = 2'-fluoro-modified nucleoside
  modified_base 7: mod_base = OTHER; note = 2'-fluoro-modified nucleoside
  modified_base 8: mod_base = OTHER; note = 2'-fluoro-modified nucleoside
  modified_base 9: mod_base = OTHER; note = 2'-fluoro-modified nucleoside
  modified_base 10: mod_base = OTHER; note = 2'-O-methyl modified nucleoside
  modified_base 11: mod_base = OTHER; note = 2'-O-methyl modified nucleoside
  modified_base 12: mod_base = OTHER; note = 2'-methoxy ethyl nucleoside
  modified_base 13: mod_base = OTHER; note = 2'-O-methyl modified nucleoside
  modified_base 14: mod_base = OTHER; note = 2'-O-methyl modified nucleoside
  modified_base 15: mod_base = OTHER; note = 2'-O-methyl modified nucleoside
  modified_base 16: mod_base = OTHER; note = 2'-O-methyl modified nucleoside
  modified_base 17: mod_base = OTHER; note = 2'-O-methyl modified nucleoside
  modified_base 18: mod_base = OTHER; note = 2'-O-methyl modified nucleoside
  modified_base 19: mod_base = OTHER; note = 2'-O-methyl modified nucleoside with phosphorothioate linkage
  modified_base 20: mod_base = OTHER; note = 2'-O-methyl modified nucleoside with phosphorothioate linkage
  modified_base 21: mod_base = OTHER; note = 2'-O-methyl modified nucleoside
tattcaagagcgagatgtatt

SEQ ID NO: 13727 - RNA, 21 nt, synthetic construct
  source 1..21: mol_type = other RNA
  misc_feature 1: note = ETL17 moiety with a phosphorothioate linkage
  modified_base 1: mod_base = OTHER; note = 2'-O-methyl modified nucleoside
  modified_base 2: mod_base = OTHER; note = 2'-O-methyl modified nucleoside
  modified_base 3: mod_base = OTHER; note = 2'-O-methyl modified nucleoside
  modified_base 4: mod_base = OTHER; note = 2'-methoxy ethyl thymidine
  modified_base 5: mod_base = OTHER; note = 2'-O-methyl modified nucleoside
  modified_base 6: mod_base = OTHER; note = 2'-fluoro-modified nucleoside
  modified_base 7: mod_base = OTHER; note = 2'-fluoro-modified nucleoside
  modified_base 8: mod_base = OTHER; note = 2'-fluoro-modified nucleoside
  modified_base 9: mod_base = OTHER; note = 2'-fluoro-modified nucleoside
  modified_base 10: mod_base = OTHER; note = 2'-O-methyl modified nucleoside
  modified_base 11: mod_base = OTHER; note = 2'-O-methyl modified nucleoside
  modified_base 12: mod_base = OTHER; note = 2'-O-methyl modified nucleoside
  modified_base 13: mod_base = OTHER; note = 2'-O-methyl modified nucleoside
  modified_base 14: mod_base = OTHER; note = 2'-methoxy ethyl nucleoside
  modified_base 15: mod_base = OTHER; note = 2'-O-methyl modified nucleoside
  modified_base 16: mod_base = OTHER; note = 2'-O-methyl modified nucleoside
  modified_base 17: mod_base = OTHER; note = 2'-O-methyl modified nucleoside
  modified_base 18: mod_base = OTHER; note = 2'-O-methyl modified nucleoside
  modified_base 19: mod_base = OTHER; note = 2'-O-methyl modified nucleoside with phosphorothioate linkage
  modified_base 20: mod_base = OTHER; note = 2'-O-methyl modified nucleoside with phosphorothioate linkage
  modified_base 21: mod_base = OTHER; note = 2'-O-methyl modified nucleoside
tattcaagagcgagatgtatt

SEQ ID NO: 13728 - RNA, 21 nt, synthetic construct
  source 1..21: mol_type = other RNA
  misc_feature 1: note = ETL17 moiety with a phosphorothioate linkage
  modified_base 1: mod_base = OTHER; note = 2'-O-methyl modified nucleoside
  modified_base 2: mod_base = OTHER; note = 2'-O-methyl modified nucleoside
  modified_base 3: mod_base = OTHER; note = 2'-O-methyl modified nucleoside
  modified_base 4: mod_base = OTHER; note = 2'-methoxy ethyl thymidine
  modified_base 5: mod_base = OTHER; note = 2'-O-methyl modified nucleoside
  modified_base 6: mod_base = OTHER; note = 2'-fluoro-modified nucleoside
  modified_base 7: mod_base = OTHER; note = 2'-fluoro-modified nucleoside
  modified_base 8: mod_base = OTHER; note = 2'-fluoro-modified nucleoside
  modified_base 9: mod_base = OTHER; note = 2'-fluoro-modified nucleoside
  modified_base 10: mod_base = OTHER; note = 2'-O-methyl modified nucleoside
  modified_base 11: mod_base = OTHER; note = 2'-O-methyl modified nucleoside
  modified_base 12: mod_base = OTHER; note = 2'-O-methyl modified nucleoside
  modified_base 13: mod_base = OTHER; note = 2'-methoxy ethyl nucleoside
  modified_base 14: mod_base = OTHER; note = 2'-O-methyl modified nucleoside
  modified_base 15: mod_base = OTHER; note = 2'-O-methyl modified nucleoside
  modified_base 16: mod_base = OTHER; note = 2'-O-methyl modified nucleoside
  modified_base 17: mod_base = OTHER; note = 2'-O-methyl modified nucleoside
  modified_base 18: mod_base = OTHER; note = 2'-O-methyl modified nucleoside
  modified_base 19: mod_base = OTHER; note = 2'-O-methyl modified nucleoside with phosphorothioate linkage
  modified_base 20: mod_base = OTHER; note = 2'-O-methyl modified nucleoside with phosphorothioate linkage
  modified_base 21: mod_base = OTHER; note = 2'-O-methyl modified nucleoside
tattcaagagcgagatgtatt

SEQ ID NO: 13729 - RNA, 21 nt, synthetic construct
  source 1..21: mol_type = other RNA
  misc_feature 1: note = ETL17 moiety with a phosphorothioate linkage
  modified_base 1: mod_base = OTHER; note = 2'-O-methyl modified nucleoside
  modified_base 2: mod_base = OTHER; note = 2'-O-methyl modified nucleoside
  modified_base 3: mod_base = OTHER; note = 2'-O-methyl modified nucleoside
  modified_base 4: mod_base = OTHER; note = 2'-methoxy ethyl thymidine
  modified_base 5: mod_base = OTHER; note = 2'-O-methyl modified nucleoside
  modified_base 6: mod_base = OTHER; note = 2'-fluoro-modified nucleoside
  modified_base 7: mod_base = OTHER; note = 2'-fluoro-modified nucleoside
  modified_base 8: mod_base = OTHER; note = 2'-fluoro-modified nucleoside
  modified_base 9: mod_base = OTHER; note = 2'-fluoro-modified nucleoside
  modified_base 10: mod_base = OTHER; note = 2'-O-methyl modified nucleoside
  modified_base 11: mod_base = OTHER; note = 2'-O-methyl modified nucleoside
  modified_base 12: mod_base = OTHER; note = 2'-O-methyl modified nucleoside
  modified_base 13: mod_base = OTHER; note = 2'-methoxy ethyl nucleoside
  modified_base 14: mod_base = OTHER; note = 2'-O-methyl modified nucleoside
  modified_base 15: mod_base = OTHER; note = 2'-O-methyl modified nucleoside
  modified_base 16: mod_base = OTHER; note = 2'-O-methyl modified nucleoside
  modified_base 17: mod_base = OTHER; note = 2'-O-methyl modified nucleoside
  modified_base 18: mod_base = OTHER; note = 2'-O-methyl modified nucleoside
  modified_base 19: mod_base = OTHER; note = 2'-O-methyl modified nucleoside with phosphorothioate linkage
  modified_base 20: mod_base = OTHER; note = 2'-O-methyl modified nucleoside with phosphorothioate linkage
  modified_base 21: mod_base = OTHER; note = 2'-O-methyl modified nucleoside
tattcaagagcgagatgtatt

SEQ ID NO: 13730 - RNA, 21 nt, synthetic construct
  source 1..21: mol_type = other RNA
  misc_feature 1: note = ETL17 moiety with a phosphorothioate linkage
  modified_base 1: mod_base = OTHER; note = 2'-O-methyl modified nucleoside
  modified_base 2: mod_base = OTHER; note = 2'-O-methyl modified nucleoside
  modified_base 3: mod_base = OTHER; note = 2'-O-methyl modified nucleoside
  modified_base 4: mod_base = OTHER; note = 2'-methoxy ethyl thymidine
  modified_base 5: mod_base = OTHER; note = 2'-O-methyl modified nucleoside
  modified_base 6: mod_base = OTHER; note = 2'-fluoro-modified nucleoside
  modified_base 7: mod_base = OTHER; note = 2'-fluoro-modified nucleoside
  modified_base 8: mod_base = OTHER; note = 2'-fluoro-modified nucleoside
  modified_base 9: mod_base = OTHER; note = 2'-fluoro-modified nucleoside
  modified_base 10: mod_base = OTHER; note = 2'-O-methyl modified nucleoside
  modified_base 11: mod_base = OTHER; note = 2'-O-methyl modified nucleoside
  modified_base 12: mod_base = OTHER; note = 2'-O-methyl modified nucleoside
  modified_base 13: mod_base = OTHER; note = 2'-methoxy ethyl nucleoside
  modified_base 14: mod_base = OTHER; note = 2'-O-methyl modified nucleoside
  modified_base 15: mod_base = OTHER; note = 2'-O-methyl modified nucleoside
  modified_base 16: mod_base = OTHER; note = 2'-O-methyl modified nucleoside
  modified_base 17: mod_base = OTHER; note = 2'-O-methyl modified nucleoside
  modified_base 18: mod_base = OTHER; note = 2'-O-methyl modified nucleoside
  modified_base 19: mod_base = OTHER; note = 2'-O-methyl modified nucleoside with phosphorothioate linkage
  modified_base 20: mod_base = OTHER; note = 2'-O-methyl modified nucleoside with phosphorothioate linkage
  modified_base 21: mod_base = OTHER; note = 2'-O-methyl modified nucleoside
tattcaagagcgagatgtatt

SEQ ID NO: 13731 - RNA, 21 nt, synthetic construct
  source 1..21: mol_type = other RNA
  misc_feature 1: note = ETL17 moiety with a phosphorothioate linkage
  modified_base 1: mod_base = OTHER; note = 2'-O-methyl modified nucleoside
  modified_base 2: mod_base = OTHER; note = 2'-O-methyl modified nucleoside
  modified_base 3: mod_base = OTHER; note = 2'-O-methyl modified nucleoside
  modified_base 4: mod_base = OTHER; note = 2'-methoxy ethyl thymidine
  modified_base 5: mod_base = OTHER; note = 2'-O-methyl modified nucleoside
  modified_base 6: mod_base = OTHER; note = 2'-fluoro-modified nucleoside
  modified_base 7: mod_base = OTHER; note = 2'-fluoro-modified nucleoside
  modified_base 8: mod_base = OTHER; note = 2'-fluoro-modified nucleoside
  modified_base 9: mod_base = OTHER; note = 2'-fluoro-modified nucleoside
  modified_base 10: mod_base = OTHER; note = 2'-O-methyl modified nucleoside
  modified_base 11: mod_base = OTHER; note = 2'-O-methyl modified nucleoside
  modified_base 12: mod_base = OTHER; note = 2'-O-methyl modified nucleoside
  modified_base 13: mod_base = OTHER; note = 2'-methoxy ethyl nucleoside
  modified_base 14: mod_base = OTHER; note = 2'-O-methyl modified nucleoside
  modified_base 15: mod_base = OTHER; note = 2'-O-methyl modified nucleoside
  modified_base 16: mod_base = OTHER; note = 2'-O-methyl modified nucleoside
  modified_base 17: mod_base = OTHER; note = 2'-O-methyl modified nucleoside
  modified_base 18: mod_base = OTHER; note = 2'-O-methyl modified nucleoside
  modified_base 19: mod_base = OTHER; note = 2'-O-methyl modified nucleoside with phosphorothioate linkage
  modified_base 20: mod_base = OTHER; note = 2'-O-methyl modified nucleoside with phosphorothioate linkage
  modified_base 21: mod_base = OTHER; note = 2'-O-methyl modified nucleoside
tattcaagagcgagatgtatt

SEQ ID NO: 13732 - RNA, 21 nt, synthetic construct
  source 1..21: mol_type = other RNA
  misc_feature 1: note = ETL17 moiety with a phosphorothioate linkage
  modified_base 1: mod_base = OTHER; note = 2'-O-methyl modified nucleoside
  modified_base 2: mod_base = OTHER; note = 2'-O-methyl modified nucleoside
  modified_base 3: mod_base = OTHER; note = 2'-O-methyl modified nucleoside
  modified_base 4: mod_base = OTHER; note = 2'-methoxy ethyl thymidine
  modified_base 5: mod_base = OTHER; note = 2'-O-methyl modified nucleoside
  modified_base 6: mod_base = OTHER; note = 2'-fluoro-modified nucleoside
  modified_base 7: mod_base = OTHER; note = 2'-fluoro-modified nucleoside
  modified_base 8: mod_base = OTHER; note = 2'-fluoro-modified nucleoside
  modified_base 9: mod_base = OTHER; note = 2'-fluoro-modified nucleoside
  modified_base 10: mod_base = OTHER; note = 2'-O-methyl modified nucleoside
  modified_base 11: mod_base = OTHER; note = 2'-O-methyl modified nucleoside
  modified_base 12: mod_base = OTHER; note = 2'-O-methyl modified nucleoside
  modified_base 13: mod_base = OTHER; note = 2'-methoxy ethyl nucleoside
  modified_base 14: mod_base = OTHER; note = 2'-O-methyl modified nucleoside
  modified_base 15: mod_base = OTHER; note = 2'-O-methyl modified nucleoside
  modified_base 16: mod_base = OTHER; note = 2'-O-methyl modified nucleoside
  modified_base 17: mod_base = OTHER; note = 2'-O-methyl modified nucleoside
  modified_base 18: mod_base = OTHER; note = 2'-O-methyl modified nucleoside
  modified_base 19: mod_base = OTHER; note = 2'-O-methyl modified nucleoside with phosphorothioate linkage
  modified_base 20: mod_base = OTHER; note = 2'-O-methyl modified nucleoside with phosphorothioate linkage
  modified_base 21: mod_base = OTHER; note = 2'-O-methyl modified nucleoside
tattcaagagcgagatgtatt

SEQ ID NO: 13733 - RNA, 21 nt, synthetic construct
  source 1..21: mol_type = other RNA
  misc_feature 1: note = ETL17 moiety with a phosphorothioate linkage
  modified_base 1: mod_base = OTHER; note = 2'-O-methyl modified nucleoside
  modified_base 2: mod_base = OTHER; note = 2'-O-methyl modified nucleoside
  modified_base 3: mod_base = OTHER; note = 2'-O-methyl modified nucleoside
  modified_base 4: mod_base = OTHER; note = 2'-methoxy ethyl thymidine
  modified_base 5: mod_base = OTHER; note = 2'-O-methyl modified nucleoside
  modified_base 6: mod_base = OTHER; note = 2'-fluoro-modified nucleoside
  modified_base 7: mod_base = OTHER; note = 2'-fluoro-modified nucleoside
  modified_base 8: mod_base = OTHER; note = 2'-fluoro-modified nucleoside
  modified_base 9: mod_base = OTHER; note = 2'-fluoro-modified nucleoside
  modified_base 10: mod_base = OTHER; note = 2'-O-methyl modified nucleoside
  modified_base 11: mod_base = OTHER; note = 2'-O-methyl modified nucleoside
  modified_base 12: mod_base = OTHER; note = 2'-O-methyl modified nucleoside
  modified_base 13: mod_base = OTHER; note = 2'-methoxy ethyl nucleoside
  modified_base 14: mod_base = OTHER; note = 2'-O-methyl modified nucleoside
  modified_base 15: mod_base = OTHER; note = 2'-O-methyl modified nucleoside
  modified_base 16: mod_base = OTHER; note = 2'-O-methyl modified nucleoside
  modified_base 17: mod_base = OTHER; note = 2'-O-methyl modified nucleoside
  modified_base 18: mod_base = OTHER; note = 2'-O-methyl modified nucleoside
  modified_base 19: mod_base = OTHER; note = 2'-O-methyl modified nucleoside with phosphorothioate linkage
  modified_base 20: mod_base = OTHER; note = 2'-O-methyl modified nucleoside with phosphorothioate linkage
  modified_base 21: mod_base = OTHER; note = 2'-O-methyl modified nucleoside
tattcaagagcgagatgtatt

SEQ ID NO: 13734 - RNA, 21 nt, synthetic construct
  source 1..21: mol_type = other RNA
  misc_feature 1: note = ETL17 moiety with a phosphorothioate linkage
  modified_base 1: mod_base = OTHER; note = 2'-O-methyl modified nucleoside
  modified_base 2: mod_base = OTHER; note = 2'-O-methyl modified nucleoside
  modified_base 3: mod_base = OTHER; note = 2'-O-methyl modified nucleoside
  modified_base 4: mod_base = OTHER; note = 2'-methoxy ethyl thymidine
  modified_base 5: mod_base = OTHER; note = 2'-O-methyl modified nucleoside
  modified_base 6: mod_base = OTHER; note = 2'-fluoro-modified nucleoside
  modified_base 7: mod_base = OTHER; note = 2'-fluoro-modified nucleoside
  modified_base 8: mod_base = OTHER; note = 2'-fluoro-modified nucleoside
  modified_base 9: mod_base = OTHER; note = 2'-fluoro-modified nucleoside
  modified_base 10: mod_base = OTHER; note = 2'-O-methyl modified nucleoside
  modified_base 11: mod_base = OTHER; note = 2'-O-methyl modified nucleoside
  modified_base 12: mod_base = OTHER; note = 2'-O-methyl modified nucleoside
  modified_base 13: mod_base = OTHER; note = 2'-methoxy ethyl nucleoside
  modified_base 14: mod_base = OTHER; note = 2'-O-methyl modified nucleoside
  modified_base 15: mod_base = OTHER; note = 2'-O-methyl modified nucleoside
  modified_base 16: mod_base = OTHER; note = 2'-O-methyl modified nucleoside
  modified_base 17: mod_base = OTHER; note = 2'-O-methyl modified nucleoside
  modified_base 18: mod_base = OTHER; note = 2'-O-methyl modified nucleoside
  modified_base 19: mod_base = OTHER; note = 2'-O-methyl modified nucleoside with phosphorothioate linkage
  modified_base 20: mod_base = OTHER; note = 2'-O-methyl modified nucleoside with phosphorothioate linkage
  modified_base 21: mod_base = OTHER; note = 2'-O-methyl modified nucleoside
tattcaagagcgagatgtatt

SEQ ID NO: 13735 - RNA, 21 nt, synthetic construct
  source 1..21: mol_type = other RNA
  misc_feature 1: note = ETL17 moiety with a phosphorothioate linkage
  modified_base 1: mod_base = OTHER; note = 2'-O-methyl modified nucleoside
  modified_base 2: mod_base = OTHER; note = 2'-O-methyl modified nucleoside
  modified_base 3: mod_base = OTHER; note = 2'-O-methyl modified nucleoside
  modified_base 4: mod_base = OTHER; note = 2'-methoxy ethyl thymidine
  modified_base 5: mod_base = OTHER; note = 2'-O-methyl modified nucleoside
  modified_base 6: mod_base = OTHER; note = 2'-fluoro-modified nucleoside
  modified_base 7: mod_base = OTHER; note = 2'-fluoro-modified nucleoside
  modified_base 8: mod_base = OTHER; note = 2'-fluoro-modified nucleoside
  modified_base 9: mod_base = OTHER; note = 2'-fluoro-modified nucleoside
  modified_base 10: mod_base = OTHER; note = 2'-O-methyl modified nucleoside
  modified_base 11: mod_base = OTHER; note = 2'-O-methyl modified nucleoside
  modified_base 12: mod_base = OTHER; note = 2'-O-methyl modified nucleoside
  modified_base 13: mod_base = OTHER; note = 2'-methoxy ethyl nucleoside
  modified_base 14: mod_base = OTHER; note = 2'-O-methyl modified nucleoside
  modified_base 15: mod_base = OTHER; note = 2'-O-methyl modified nucleoside
  modified_base 16: mod_base = OTHER; note = 2'-O-methyl modified nucleoside
  modified_base 17: mod_base = OTHER; note = 2'-O-methyl modified nucleoside
  modified_base 18: mod_base = OTHER; note = 2'-O-methyl modified nucleoside
  modified_base 19: mod_base = OTHER; note = 2'-O-methyl modified nucleoside with phosphorothioate linkage
  modified_base 20: mod_base = OTHER; note = 2'-O-methyl modified nucleoside with phosphorothioate linkage
  modified_base 21: mod_base = OTHER; note = 2'-O-methyl modified nucleoside
tattcaagagcgagatgtatt

SEQ ID NO: 13736 - RNA, 21 nt, synthetic construct
  source 1..21: mol_type = other RNA
  misc_feature 1: note = ETL17 moiety with a phosphorothioate linkage
  modified_base 1: mod_base = OTHER; note = 2'-O-methyl modified nucleoside
  modified_base 2: mod_base = OTHER; note = 2'-O-methyl modified nucleoside
  modified_base 3: mod_base = OTHER; note = 2'-O-methyl modified nucleoside
  modified_base 4: mod_base = OTHER; note = 2'-methoxy ethyl thymidine
  modified_base 5: mod_base = OTHER; note = 2'-O-methyl modified nucleoside
  modified_base 6: mod_base = OTHER; note = 2'-O-methyl modified nucleoside
  modified_base 7: mod_base = OTHER; note = 2'-fluoro-modified nucleoside
  modified_base 8: mod_base = OTHER; note = 2'-fluoro-modified nucleoside
  modified_base 9: mod_base = OTHER; note = 2'-fluoro-modified nucleoside
  modified_base 10: mod_base = OTHER; note = 2'-fluoro-modified nucleoside
  modified_base 11: mod_base = OTHER; note = 2'-O-methyl modified nucleoside
  modified_base 12: mod_base = OTHER; note = 2'-O-methyl modified nucleoside
  modified_base 13: mod_base = OTHER; note = 2'-methoxy ethyl nucleoside
  modified_base 14: mod_base = OTHER; note = 2'-O-methyl modified nucleoside
  modified_base 15: mod_base = OTHER; note = 2'-O-methyl modified nucleoside
  modified_base 16: mod_base = OTHER; note = 2'-O-methyl modified nucleoside
  modified_base 17: mod_base = OTHER; note = 2'-O-methyl modified nucleoside
  modified_base 18: mod_base = OTHER; note = 2'-O-methyl modified nucleoside
  modified_base 19: mod_base = OTHER; note = 2'-O-methyl modified nucleoside with phosphorothioate linkage
  modified_base 20: mod_base = OTHER; note = 2'-O-methyl modified nucleoside with phosphorothioate linkage
  modified_base 21: mod_base = OTHER; note = 2'-O-methyl modified nucleoside
cattgcttcaggcaataaatt

SEQ ID NO: 13737 - RNA, 21 nt, synthetic construct
  source 1..21: mol_type = other RNA
  misc_feature 1: note = ETL17 moiety with a phosphorothioate linkage
  modified_base 1: mod_base = OTHER; note = 2'-O-methyl modified nucleoside
  modified_base 2: mod_base = OTHER; note = 2'-O-methyl modified nucleoside
  modified_base 3: mod_base = OTHER; note = 2'-O-methyl modified nucleoside
  modified_base 4: mod_base = OTHER; note = 2'-methoxy ethyl thymidine
  modified_base 5: mod_base = OTHER; note = 2'-fluoro-modified nucleoside
  modified_base 6: mod_base = OTHER; note = 2'-O-methyl modified nucleoside
  modified_base 7: mod_base = OTHER; note = 2'-fluoro-modified nucleoside
  modified_base 8: mod_base = OTHER; note = 2'-fluoro-modified nucleoside
  modified_base 9: mod_base = OTHER; note = 2'-fluoro-modified nucleoside
  modified_base 10: mod_base = OTHER; note = 2'-fluoro-modified nucleoside
  modified_base 11: mod_base = OTHER; note = 2'-O-methyl modified nucleoside
  modified_base 12: mod_base = OTHER; note = 2'-O-methyl modified nucleoside
  modified_base 13: mod_base = OTHER; note = 2'-methoxy ethyl nucleoside
  modified_base 14: mod_base = OTHER; note = 2'-O-methyl modified nucleoside
  modified_base 15: mod_base = OTHER; note = 2'-O-methyl modified nucleoside
  modified_base 16: mod_base = OTHER; note = 2'-O-methyl modified nucleoside
  modified_base 17: mod_base = OTHER; note = 2'-O-methyl modified nucleoside
  modified_base 18: mod_base = OTHER; note = 2'-O-methyl modified nucleoside
  modified_base 19: mod_base = OTHER; note = 2'-O-methyl modified nucleoside with phosphorothioate linkage
  modified_base 20: mod_base = OTHER; note = 2'-O-methyl modified nucleoside with phosphorothioate linkage
  modified_base 21: mod_base = OTHER; note = 2'-O-methyl modified nucleoside
cattgcttcaggcaataaatt

SEQ ID NO: 13738 - RNA, 21 nt, synthetic construct
  source 1..21: mol_type = other RNA
  misc_feature 1: note = ETL17 moiety with a phosphorothioate linkage
  modified_base 1: mod_base = OTHER; note = 2'-O-methyl modified nucleoside
  modified_base 2: mod_base = OTHER; note = 2'-O-methyl modified nucleoside
  modified_base 3: mod_base = OTHER; note = 2'-O-methyl modified nucleoside
  modified_base 4: mod_base = OTHER; note = 2'-methoxy ethyl thymidine
  modified_base 5: mod_base = OTHER; note = 2'-fluoro-modified nucleoside
  modified_base 6: mod_base = OTHER; note = 2'-O-methyl modified nucleoside
  modified_base 7: mod_base = OTHER; note = 2'-fluoro-modified nucleoside
  modified_base 8: mod_base = OTHER; note = 2'-fluoro-modified nucleoside
  modified_base 9: mod_base = OTHER; note = 2'-fluoro-modified nucleoside
  modified_base 10: mod_base = OTHER; note = 2'-fluoro-modified nucleoside
  modified_base 11: mod_base = OTHER; note = 2'-O-methyl modified nucleoside
  modified_base 12: mod_base = OTHER; note = 2'-methoxy ethyl nucleoside
  modified_base 13: mod_base = OTHER; note = 2'-O-methyl modified nucleoside
  modified_base 14: mod_base = OTHER; note = 2'-O-methyl modified nucleoside
  modified_base 15: mod_base = OTHER; note = 2'-O-methyl modified nucleoside
  modified_base 16: mod_base = OTHER; note = 2'-O-methyl modified nucleoside
  modified_base 17: mod_base = OTHER; note = 2'-O-methyl modified nucleoside
  modified_base 18: mod_base = OTHER; note = 2'-O-methyl modified nucleoside
  modified_base 19: mod_base = OTHER; note = 2'-O-methyl modified nucleoside with phosphorothioate linkage
  modified_base 20: mod_base = OTHER; note = 2'-O-methyl modified nucleoside with phosphorothioate linkage
  modified_base 21: mod_base = OTHER; note = 2'-O-methyl modified nucleoside
cattgcttcaggcaataaatt

SEQ ID NO: 13739 - RNA, 21 nt, synthetic construct
  source 1..21: mol_type = other RNA
  misc_feature 1: note = ETL17 moiety with a phosphorothioate linkage
  modified_base 1: mod_base = OTHER; note = 2'-O-methyl modified nucleoside
  modified_base 2: mod_base = OTHER; note = 2'-O-methyl modified nucleoside
  modified_base 3: mod_base = OTHER; note = 2'-O-methyl modified nucleoside
  modified_base 4: mod_base = OTHER; note = 2'-methoxy ethyl thymidine
  modified_base 5: mod_base = OTHER; note = 2'-fluoro-modified nucleoside
  modified_base 6: mod_base = OTHER; note = 2'-O-methyl modified nucleoside
  modified_base 7: mod_base = OTHER; note = 2'-fluoro-modified nucleoside
  modified_base 8: mod_base = OTHER; note = 2'-fluoro-modified nucleoside
  modified_base 9: mod_base = OTHER; note = 2'-fluoro-modified nucleoside
  modified_base 10: mod_base = OTHER; note = 2'-fluoro-modified nucleoside
  modified_base 11: mod_base = OTHER; note = 2'-O-methyl modified nucleoside
  modified_base 12: mod_base = OTHER; note = 2'-O-methyl modified nucleoside
  modified_base 13: mod_base = OTHER; note = 2'-O-methyl modified nucleoside
  modified_base 14: mod_base = OTHER; note = 2'-methoxy ethyl nucleoside
  modified_base 15: mod_base = OTHER; note = 2'-O-methyl modified nucleoside
  modified_base 16: mod_base = OTHER; note = 2'-O-methyl modified nucleoside
  modified_base 17: mod_base = OTHER; note = 2'-O-methyl modified nucleoside
  modified_base 18: mod_base = OTHER; note = 2'-O-methyl modified nucleoside
  modified_base 19: mod_base = OTHER; note = 2'-O-methyl modified nucleoside with phosphorothioate linkage
  modified_base 20: mod_base = OTHER; note = 2'-O-methyl modified nucleoside with phosphorothioate linkage
  modified_base 21: mod_base = OTHER; note = 2'-O-methyl modified nucleoside
cattgcttcaggcaataaatt

SEQ ID NO: 13740 - RNA, 21 nt, synthetic construct
  source 1..21: mol_type = other RNA
  misc_feature 1: note = ETL17 moiety with a phosphorothioate linkage
  modified_base 1: mod_base = OTHER; note = 2'-O-methyl modified nucleoside
  modified_base 2: mod_base = OTHER; note = 2'-O-methyl modified nucleoside
  modified_base 3: mod_base = OTHER; note = 2'-O-methyl modified nucleoside
  modified_base 4: mod_base = OTHER; note = 2'-methoxy ethyl thymidine
  modified_base 5: mod_base = OTHER; note = 2'-O-methyl modified nucleoside
  modified_base 6: mod_base = OTHER; note = 2'-fluoro-modified nucleoside
  modified_base 7: mod_base = OTHER; note = 2'-fluoro-modified nucleoside
  modified_base 8: mod_base = OTHER; note = 2'-fluoro-modified nucleoside
  modified_base 9: mod_base = OTHER; note = 2'-fluoro-modified nucleoside
  modified_base 10: mod_base = OTHER; note = 2'-O-methyl modified nucleoside
  modified_base 11: mod_base = OTHER; note = 2'-O-methyl modified nucleoside
  modified_base 12: mod_base = OTHER; note = 2'-O-methyl modified nucleoside
  modified_base 13: mod_base = OTHER; note = 2'-methoxy ethyl nucleoside
  modified_base 14: mod_base = OTHER; note = 2'-O-methyl modified nucleoside
  modified_base 15: mod_base = OTHER; note = 2'-O-methyl modified nucleoside
  modified_base 16: mod_base = OTHER; note = 2'-O-methyl modified nucleoside
  modified_base 17: mod_base = OTHER; note = 2'-O-methyl modified nucleoside
  modified_base 18: mod_base = OTHER; note = 2'-O-methyl modified nucleoside
  modified_base 19: mod_base = OTHER; note = 2'-O-methyl modified nucleoside with phosphorothioate linkage
  modified_base 20: mod_base = OTHER; note = 2'-O-methyl modified nucleoside with phosphorothioate linkage
  modified_base 21: mod_base = OTHER; note = 2'-O-methyl modified nucleoside
cattgcttcaggcaataaatt

SEQ ID NO: 13741 - RNA, 21 nt, synthetic construct
  source 1..21: mol_type = other RNA
  misc_feature 1: note = ETL17 moiety with a phosphorothioate linkage
  modified_base 1: mod_base = OTHER; note = 2'-O-methyl modified nucleoside
  modified_base 2: mod_base = OTHER; note = 2'-O-methyl modified nucleoside
  modified_base 3: mod_base = OTHER; note = 2'-O-methyl modified nucleoside
  modified_base 4: mod_base = OTHER; note = 2'-methoxy ethyl thymidine
  modified_base 5: mod_base = OTHER; note = 2'-O-methyl modified nucleoside
  modified_base 6: mod_base = OTHER; note = 2'-fluoro-modified nucleoside
  modified_base 7: mod_base = OTHER; note = 2'-fluoro-modified nucleoside
  modified_base 8: mod_base = OTHER; note = 2'-fluoro-modified nucleoside
  modified_base 9: mod_base = OTHER; note = 2'-fluoro-modified nucleoside
  modified_base 10: mod_base = OTHER; note = 2'-O-methyl modified nucleoside
  modified_base 11: mod_base = OTHER; note = 2'-O-methyl modified nucleoside
  modified_base 12: mod_base = OTHER; note = 2'-O-methyl modified nucleoside
  modified_base 13: mod_base = OTHER; note = 2'-methoxy ethyl nucleoside
  modified_base 14: mod_base = OTHER; note = 2'-O-methyl modified nucleoside
  modified_base 15: mod_base = OTHER; note = 2'-O-methyl modified nucleoside
  modified_base 16: mod_base = OTHER; note = 2'-O-methyl modified nucleoside
  modified_base 17: mod_base = OTHER; note = 2'-O-methyl modified nucleoside
  modified_base 18: mod_base = OTHER; note = 2'-O-methyl modified nucleoside
  modified_base 19: mod_base = OTHER; note = 2'-O-methyl modified nucleoside with phosphorothioate linkage
  modified_base 20: mod_base = OTHER; note = 2'-O-methyl modified nucleoside with phosphorothioate linkage
  modified_base 21: mod_base = OTHER; note = 2'-O-methyl modified nucleoside
cattgcttcaggcaataaatt

SEQ ID NO: 13742 - RNA, 21 nt, synthetic construct
  source 1..21: mol_type = other RNA
  misc_feature 1: note = ETL17 moiety with a phosphorothioate linkage
  modified_base 1: mod_base = OTHER; note = 2'-O-methyl modified nucleoside
  modified_base 2: mod_base = OTHER; note = 2'-O-methyl modified nucleoside
  modified_base 3: mod_base = OTHER; note = 2'-O-methyl modified nucleoside
  modified_base 4: mod_base = OTHER; note = 2'-methoxy ethyl thymidine
  modified_base 5: mod_base = OTHER; note = 2'-O-methyl modified nucleoside
  modified_base 6: mod_base = OTHER; note = 2'-fluoro-modified nucleoside
  modified_base 7: mod_base = OTHER; note = 2'-fluoro-modified nucleoside
  modified_base 8: mod_base = OTHER; note = 2'-fluoro-modified nucleoside
  modified_base 9: mod_base = OTHER; note = 2'-fluoro-modified nucleoside
  modified_base 10: mod_base = OTHER; note = 2'-O-methyl modified nucleoside
  modified_base 11: mod_base = OTHER; note = 2'-O-methyl modified nucleoside
  modified_base 12: mod_base = OTHER; note = 2'-O-methyl modified nucleoside
  modified_base 13: mod_base = OTHER; note = 2'-methoxy ethyl nucleoside
  modified_base 14: mod_base = OTHER; note = 2'-O-methyl modified nucleoside
  modified_base 15: mod_base = OTHER; note = 2'-O-methyl modified nucleoside
  modified_base 16: mod_base = OTHER; note = 2'-O-methyl modified nucleoside
  modified_base 17: mod_base = OTHER; note = 2'-O-methyl modified nucleoside
  modified_base 18: mod_base = OTHER; note = 2'-O-methyl modified nucleoside
  modified_base 19: mod_base = OTHER; note = 2'-O-methyl modified nucleoside with phosphorothioate linkage
  modified_base 20: mod_base = OTHER; note = 2'-O-methyl modified nucleoside with phosphorothioate linkage
  modified_base 21: mod_base = OTHER; note = 2'-O-methyl modified nucleoside
cattgcttcaggcaataaatt

SEQ ID NO: 13743 - RNA, 21 nt, synthetic construct
  source 1..21: mol_type = other RNA
  misc_feature 1: note = ETL17 moiety with a phosphorothioate linkage
  modified_base 1: mod_base = OTHER; note = 2'-O-methyl modified nucleoside
  modified_base 2: mod_base = OTHER; note = 2'-O-methyl modified nucleoside
  modified_base 3: mod_base = OTHER; note = 2'-O-methyl modified nucleoside
  modified_base 4: mod_base = OTHER; note = 2'-methoxy ethyl thymidine
  modified_base 5: mod_base = OTHER; note = 2'-O-methyl modified nucleoside
  modified_base 6: mod_base = OTHER; note = 2'-fluoro-modified nucleoside
  modified_base 7: mod_base = OTHER; note = 2'-fluoro-modified nucleoside
  modified_base 8: mod_base = OTHER; note = 2'-fluoro-modified nucleoside
  modified_base 9: mod_base = OTHER; note = 2'-fluoro-modified nucleoside
  modified_base 10: mod_base = OTHER; note = 2'-O-methyl modified nucleoside
  modified_base 11: mod_base = OTHER; note = 2'-O-methyl modified nucleoside
  modified_base 12: mod_base = OTHER; note = 2'-O-methyl modified nucleoside
  modified_base 13: mod_base = OTHER; note = 2'-methoxy ethyl nucleoside
  modified_base 14: mod_base = OTHER; note = 2'-O-methyl modified nucleoside
  modified_base 15: mod_base = OTHER; note = 2'-O-methyl modified nucleoside
  modified_base 16: mod_base = OTHER; note = 2'-O-methyl modified nucleoside
  modified_base 17: mod_base = OTHER; note = 2'-O-methyl modified nucleoside
  modified_base 18: mod_base = OTHER; note = 2'-O-methyl modified nucleoside
  modified_base 19: mod_base = OTHER; note = 2'-O-methyl modified nucleoside with phosphorothioate linkage
  modified_base 20: mod_base = OTHER; note = 2'-O-methyl modified nucleoside with phosphorothioate linkage
  modified_base 21: mod_base = OTHER; note = 2'-O-methyl modified nucleoside
cattgcttcaggcaataaatt

SEQ ID NO: 13744 - RNA, 21 nt, synthetic construct
  source 1..21: mol_type = other RNA
  misc_feature 1: note = ETL17 moiety with a phosphorothioate linkage
  modified_base 1: mod_base = OTHER; note = 2'-O-methyl modified nucleoside
  modified_base 2: mod_base = OTHER; note = 2'-O-methyl modified nucleoside
  modified_base 3: mod_base = OTHER; note = 2'-O-methyl modified nucleoside
  modified_base 4: mod_base = OTHER; note = 2'-methoxy ethyl thymidine
  modified_base 5: mod_base = OTHER; note = 2'-O-methyl modified nucleoside
  modified_base 6: mod_base = OTHER; note = 2'-fluoro-modified nucleoside
  modified_base 7: mod_base = OTHER; note = 2'-fluoro-modified nucleoside
  modified_base 8: mod_base = OTHER; note = 2'-fluoro-modified nucleoside
  modified_base 9: mod_base = OTHER; note = 2'-fluoro-modified nucleoside
  modified_base 10: mod_base = OTHER; note = 2'-O-methyl modified nucleoside
  modified_base 11: mod_base = OTHER; note = 2'-O-methyl modified nucleoside
  modified_base 12: mod_base = OTHER; note = 2'-O-methyl modified nucleoside
  modified_base 13: mod_base = OTHER; note = 2'-methoxy ethyl nucleoside
  modified_base 14: mod_base = OTHER; note = 2'-O-methyl modified nucleoside
  modified_base 15: mod_base = OTHER; note = 2'-O-methyl modified nucleoside
  modified_base 16: mod_base = OTHER; note = 2'-O-methyl modified nucleoside
  modified_base 17: mod_base = OTHER; note = 2'-O-methyl modified nucleoside
  modified_base 18: mod_base = OTHER; note = 2'-O-methyl modified nucleoside
  modified_base 19: mod_base = OTHER; note = 2'-O-methyl modified nucleoside with phosphorothioate linkage
  modified_base 20: mod_base = OTHER; note = 2'-O-methyl modified nucleoside with phosphorothioate linkage
  modified_base 21: mod_base = OTHER; note = 2'-O-methyl modified nucleoside
cattgcttcaggcaataaatt

SEQ ID NO: 13745 - RNA, 21 nt, synthetic construct
  source 1..21: mol_type = other RNA
  misc_feature 1: note = ETL17 moiety with a phosphorothioate linkage
  modified_base 1: mod_base = OTHER; note = 2'-O-methyl modified nucleoside
  modified_base 2: mod_base = OTHER; note = 2'-O-methyl modified nucleoside
  modified_base 3: mod_base = OTHER; note = 2'-O-methyl modified nucleoside
  modified_base 4: mod_base = OTHER; note = 2'-methoxy ethyl thymidine
  modified_base 5: mod_base = OTHER; note = 2'-O-methyl modified nucleoside
  modified_base 6: mod_base = OTHER; note = 2'-fluoro-modified nucleoside
  modified_base 7: mod_base = OTHER; note = 2'-fluoro-modified nucleoside
  modified_base 8: mod_base = OTHER; note = 2'-fluoro-modified nucleoside
  modified_base 9: mod_base = OTHER; note = 2'-fluoro-modified nucleoside
  modified_base 10: mod_base = OTHER; note = 2'-O-methyl modified nucleoside
  modified_base 11: mod_base = OTHER; note = 2'-O-methyl modified nucleoside
  modified_base 12: mod_base = OTHER; note = 2'-O-methyl modified nucleoside
  modified_base 13: mod_base = OTHER; note = 2'-methoxy ethyl nucleoside
  modified_base 14: mod_base = OTHER; note = 2'-O-methyl modified nucleoside
  modified_base 15: mod_base = OTHER; note = 2'-O-methyl modified nucleoside
  modified_base 16: mod_base = OTHER; note = 2'-O-methyl modified nucleoside
  modified_base 17: mod_base = OTHER; note = 2'-O-methyl modified nucleoside
  modified_base 18: mod_base = OTHER; note = 2'-O-methyl modified nucleoside
  modified_base 19: mod_base = OTHER; note = 2'-O-methyl modified nucleoside with phosphorothioate linkage
  modified_base 20: mod_base = OTHER; note = 2'-O-methyl modified nucleoside with phosphorothioate linkage
  modified_base 21: mod_base = OTHER; note = 2'-O-methyl modified nucleoside
cattgcttcaggcaataaatt

SEQ ID NO: 13746 - RNA, 21 nt, synthetic construct
  source 1..21: mol_type = other RNA
  misc_feature 1: note = ETL17 moiety with a phosphorothioate linkage
  modified_base 1: mod_base = OTHER; note = 2'-O-methyl modified nucleoside
  modified_base 2: mod_base = OTHER; note = 2'-O-methyl modified nucleoside
  modified_base 3: mod_base = OTHER; note = 2'-O-methyl modified nucleoside
  modified_base 4: mod_base = OTHER; note = 2'-methoxy ethyl thymidine
  modified_base 5: mod_base = OTHER; note = 2'-O-methyl modified nucleoside
  modified_base 6: mod_base = OTHER; note = 2'-fluoro-modified nucleoside
  modified_base 7: mod_base = OTHER; note = 2'-fluoro-modified nucleoside
  modified_base 8: mod_base = OTHER; note = 2'-fluoro-modified nucleoside
  modified_base 9: mod_base = OTHER; note = 2'-fluoro-modified nucleoside
  modified_base 10: mod_base = OTHER; note = 2'-O-methyl modified nucleoside
  modified_base 11: mod_base = OTHER; note = 2'-O-methyl modified nucleoside
  modified_base 12: mod_base = OTHER; note = 2'-O-methyl modified nucleoside
  modified_base 13: mod_base = OTHER; note = 2'-methoxy ethyl nucleoside
  modified_base 14: mod_base = OTHER; note = 2'-O-methyl modified nucleoside
  modified_base 15: mod_base = OTHER; note = 2'-O-methyl modified nucleoside
  modified_base 16: mod_base = OTHER; note = 2'-O-methyl modified nucleoside
  modified_base 17: mod_base = OTHER; note = 2'-O-methyl modified nucleoside
  modified_base 18: mod_base = OTHER; note = 2'-O-methyl modified nucleoside
  modified_base 19: mod_base = OTHER; note = 2'-O-methyl modified nucleoside with phosphorothioate linkage
  modified_base 20: mod_base = OTHER; note = 2'-O-methyl modified nucleoside with phosphorothioate linkage
  modified_base 21: mod_base = OTHER; note = 2'-O-methyl modified nucleoside
cattgcttcaggcaataaatt

SEQ ID NO: 13747 - RNA, 21 nt, synthetic construct
  source 1..21: mol_type = other RNA
  misc_feature 1: note = ETL17 moiety with a phosphorothioate linkage
  modified_base 1: mod_base = OTHER; note = 2'-O-methyl modified nucleoside
  modified_base 2: mod_base = OTHER; note = 2'-O-methyl modified nucleoside
  modified_base 3: mod_base = OTHER; note = 2'-O-methyl modified nucleoside
  modified_base 4: mod_base = OTHER; note = 2'-methoxy ethyl thymidine
  modified_base 5: mod_base = OTHER; note = 2'-O-methyl modified nucleoside
  modified_base 6: mod_base = OTHER; note = 2'-fluoro-modified nucleoside
  modified_base 7: mod_base = OTHER; note = 2'-fluoro-modified nucleoside
  modified_base 8: mod_base = OTHER; note = 2'-fluoro-modified nucleoside
  modified_base 9: mod_base = OTHER; note = 2'-fluoro-modified nucleoside
  modified_base 10: mod_base = OTHER; note = 2'-O-methyl modified nucleoside
  modified_base 11: mod_base = OTHER; note = 2'-O-methyl modified nucleoside
  modified_base 12: mod_base = OTHER; note = 2'-O-methyl modified nucleoside
  modified_base 13: mod_base = OTHER; note = 2'-methoxy ethyl nucleoside
  modified_base 14: mod_base = OTHER; note = 2'-O-methyl modified nucleoside
  modified_base 15: mod_base = OTHER; note = 2'-O-methyl modified nucleoside
  modified_base 16: mod_base = OTHER; note = 2'-O-methyl modified nucleoside
  modified_base 17: mod_base = OTHER; note = 2'-O-methyl modified nucleoside
  modified_base 18: mod_base = OTHER; note = 2'-O-methyl modified nucleoside
  modified_base 19: mod_base = OTHER; note = 2'-O-methyl modified nucleoside with phosphorothioate linkage
  modified_base 20: mod_base = OTHER; note = 2'-O-methyl modified nucleoside with phosphorothioate linkage
  modified_base 21: mod_base = OTHER; note = 2'-O-methyl modified nucleoside
cattgcttcaggcaataaatt

SEQ ID NO: 13748 - RNA, 21 nt, synthetic construct
  source 1..21: mol_type = other RNA
  misc_feature 1: note = ETL17 moiety with a phosphorothioate linkage
  modified_base 1: mod_base = OTHER; note = 2'-O-methyl modified nucleoside
  modified_base 2: mod_base = OTHER; note = 2'-O-methyl modified nucleoside
  modified_base 3: mod_base = OTHER; note = 2'-O-methyl modified nucleoside
  modified_base 4: mod_base = OTHER; note = 2'-methoxy ethyl thymidine
  modified_base 5: mod_base = OTHER; note = 2'-O-methyl modified nucleoside
  modified_base 6: mod_base = OTHER; note = 2'-O-methyl modified nucleoside
  modified_base 7: mod_base = OTHER; note = 2'-fluoro-modified nucleoside
  modified_base 8: mod_base = OTHER; note = 2'-fluoro-modified nucleoside
  modified_base 9: mod_base = OTHER; note = 2'-fluoro-modified nucleoside
  modified_base 10: mod_base = OTHER; note = 2'-fluoro-modified nucleoside
  modified_base 11: mod_base = OTHER; note = 2'-O-methyl modified nucleoside
  modified_base 12: mod_base = OTHER; note = 2'-O-methyl modified nucleoside
  modified_base 13: mod_base = OTHER; note = 2'-methoxy ethyl nucleoside
  modified_base 14: mod_base = OTHER; note = 2'-O-methyl modified nucleoside
  modified_base 15: mod_base = OTHER; note = 2'-O-methyl modified nucleoside
  modified_base 16: mod_base = OTHER; note = 2'-O-methyl modified nucleoside
  modified_base 17: mod_base = OTHER; note = 2'-O-methyl modified nucleoside
  modified_base 18: mod_base = OTHER; note = 2'-O-methyl modified nucleoside
  modified_base 19: mod_base = OTHER; note = 2'-O-methyl modified nucleoside with phosphorothioate linkage
  modified_base 20: mod_base = OTHER; note = 2'-O-methyl modified nucleoside with phosphorothioate linkage
  modified_base 21: mod_base = OTHER; note = 2'-O-methyl modified nucleoside
aattacttcgacagcagcatt

SEQ ID NO: 13749 - RNA, 21 nt, synthetic construct
  source 1..21: mol_type = other RNA
  misc_feature 1: note = ETL17 moiety with a phosphorothioate linkage
  modified_base 1: mod_base = OTHER; note = 2'-O-methyl modified nucleoside
  modified_base 2: mod_base = OTHER; note = 2'-O-methyl modified nucleoside
  modified_base 3: mod_base = OTHER; note = 2'-O-methyl modified nucleoside
  modified_base 4: mod_base = OTHER; note = 2'-methoxy ethyl thymidine
  modified_base 5: mod_base = OTHER; note = 2'-fluoro-modified nucleoside
  modified_base 6: mod_base = OTHER; note = 2'-O-methyl modified nucleoside
  modified_base 7: mod_base = OTHER; note = 2'-fluoro-modified nucleoside
  modified_base 8: mod_base = OTHER; note = 2'-fluoro-modified nucleoside
  modified_base 9: mod_base = OTHER; note = 2'-fluoro-modified nucleoside
  modified_base 10: mod_base = OTHER; note = 2'-fluoro-modified nucleoside
  modified_base 11: mod_base = OTHER; note = 2'-O-methyl modified nucleoside
  modified_base 12: mod_base = OTHER; note = 2'-O-methyl modified nucleoside
  modified_base 13: mod_base = OTHER; note = 2'-methoxy ethyl nucleoside
  modified_base 14: mod_base = OTHER; note = 2'-O-methyl modified nucleoside
  modified_base 15: mod_base = OTHER; note = 2'-O-methyl modified nucleoside
  modified_base 16: mod_base = OTHER; note = 2'-O-methyl modified nucleoside
  modified_base 17: mod_base = OTHER; note = 2'-O-methyl modified nucleoside
  modified_base 18: mod_base = OTHER; note = 2'-O-methyl modified nucleoside
  modified_base 19: mod_base = OTHER; note = 2'-O-methyl modified nucleoside with phosphorothioate linkage
  modified_base 20: mod_base = OTHER; note = 2'-O-methyl modified nucleoside with phosphorothioate linkage
  modified_base 21: mod_base = OTHER; note = 2'-O-methyl modified nucleoside
aattacttcgacagcagcatt

SEQ ID NO: 13750 - RNA, 21 nt, synthetic construct
  source 1..21: mol_type = other RNA
  misc_feature 1: note = ETL17 moiety with a phosphorothioate linkage
  modified_base 1: mod_base = OTHER; note = 2'-O-methyl modified nucleoside
  modified_base 2: mod_base = OTHER; note = 2'-O-methyl modified nucleoside
  modified_base 3: mod_base = OTHER; note = 2'-O-methyl modified nucleoside
  modified_base 4: mod_base = OTHER; note = 2'-methoxy ethyl thymidine
  modified_base 5: mod_base = OTHER; note = 2'-O-methyl modified nucleoside
  modified_base 6: mod_base = OTHER; note = 2'-fluoro-modified nucleoside
  modified_base 7: mod_base = OTHER; note = 2'-fluoro-modified nucleoside
  modified_base 8: mod_base = OTHER; note = 2'-fluoro-modified nucleoside
  modified_base 9: mod_base = OTHER; note = 2'-fluoro-modified nucleoside
  modified_base 10: mod_base = OTHER; note = 2'-O-methyl modified nucleoside
  modified_base 11: mod_base = OTHER; note = 2'-O-methyl modified nucleoside
  modified_base 12: mod_base = OTHER; note = 2'-O-methyl modified nucleoside
  modified_base 13: mod_base = OTHER; note = 2'-O-methyl modified nucleoside
  modified_base 14: mod_base = OTHER; note = 2'-methoxy ethyl nucleoside
  modified_base 15: mod_base = OTHER; note = 2'-O-methyl modified nucleoside
  modified_base 16: mod_base = OTHER; note = 2'-O-methyl modified nucleoside
  modified_base 17: mod_base = OTHER; note = 2'-O-methyl modified nucleoside
  modified_base 18: mod_base = OTHER; note = 2'-O-methyl modified nucleoside
  modified_base 19: mod_base = OTHER; note = 2'-O-methyl modified nucleoside with phosphorothioate linkage
  modified_base 20: mod_base = OTHER; note = 2'-O-methyl modified nucleoside with phosphorothioate linkage
  modified_base 21: mod_base = OTHER; note = 2'-O-methyl modified nucleoside
aattacttcgacagcagcatt

SEQ ID NO: 13751 - RNA, 21 nt, synthetic construct
  source 1..21: mol_type = other RNA
  misc_feature 1: note = ETL17 moiety with a phosphorothioate linkage
  modified_base 1: mod_base = OTHER; note = 2'-O-methyl modified nucleoside
  modified_base 2: mod_base = OTHER; note = 2'-O-methyl modified nucleoside
  modified_base 3: mod_base = OTHER; note = 2'-O-methyl modified nucleoside
  modified_base 4: mod_base = OTHER; note = 2'-methoxy ethyl thymidine
  modified_base 5: mod_base = OTHER; note = 2'-O-methyl modified nucleoside
  modified_base 6: mod_base = OTHER; note = 2'-fluoro-modified nucleoside
  modified_base 7: mod_base = OTHER; note = 2'-fluoro-modified nucleoside
  modified_base 8: mod_base = OTHER; note = 2'-fluoro-modified nucleoside
  modified_base 9: mod_base = OTHER; note = 2'-fluoro-modified nucleoside
  modified_base 10: mod_base = OTHER; note = 2'-O-methyl modified nucleoside
  modified_base 11: mod_base = OTHER; note = 2'-O-methyl modified nucleoside
  modified_base 12: mod_base = OTHER; note = 2'-methoxy ethyl nucleoside
  modified_base 13: mod_base = OTHER; note = 2'-O-methyl modified nucleoside
  modified_base 14: mod_base = OTHER; note = 2'-O-methyl modified nucleoside
  modified_base 15: mod_base = OTHER; note = 2'-O-methyl modified nucleoside
  modified_base 16: mod_base = OTHER; note = 2'-O-methyl modified nucleoside
  modified_base 17: mod_base = OTHER; note = 2'-O-methyl modified nucleoside
  modified_base 18: mod_base = OTHER; note = 2'-O-methyl modified nucleoside
  modified_base 19: mod_base = OTHER; note = 2'-O-methyl modified nucleoside with phosphorothioate linkage
  modified_base 20: mod_base = OTHER; note = 2'-O-methyl modified nucleoside with phosphorothioate linkage
  modified_base 21: mod_base = OTHER; note = 2'-O-methyl modified nucleoside
aattacttcgacagcagcatt

SEQ ID NO: 13752 - RNA, 21 nt, synthetic construct
  source 1..21: mol_type = other RNA
  modified_base 1: mod_base = OTHER; note = 2'-O-methyl modified nucleoside with phosphorothioate linkage
  modified_base 2: mod_base = OTHER; note = 2'-fluoro-modified nucleoside with phosphorothioate linkage
  modified_base 3: mod_base = OTHER; note = 2'-O-methyl modified nucleoside
  modified_base 4: mod_base = OTHER; note = 2'-fluoro-modified nucleoside
  modified_base 5: mod_base = OTHER; note = 2'-O-methyl modified nucleoside
  modified_base 6: mod_base = OTHER; note = 2'-fluoro-modified nucleoside
  modified_base 7: mod_base = OTHER; note = 2'-O-methyl modified nucleoside
  modified_base 8: mod_base = OTHER; note = 2'-fluoro-modified nucleoside
  modified_base 9: mod_base = OTHER; note = 2'-O-methyl modified nucleoside
  modified_base 10: mod_base = OTHER; note = 2'-fluoro-modified nucleoside
  modified_base 11: mod_base = OTHER; note = 2'-O-methyl modified nucleoside
  modified_base 12: mod_base = OTHER; note = 2'-fluoro-modified nucleoside
  modified_base 13: mod_base = OTHER; note = 2'-O-methyl modified nucleoside
  modified_base 14: mod_base = OTHER; note = 2'-fluoro-modified nucleoside
  modified_base 15: mod_base = OTHER; note = 2'-O-methyl modified nucleoside
  modified_base 16: mod_base = OTHER; note = 2'-fluoro-modified nucleoside
  modified_base 17: mod_base = OTHER; note = 2'-O-methyl modified nucleoside
  modified_base 18: mod_base = OTHER; note = 2'-fluoro-modified nucleoside
  modified_base 19: mod_base = OTHER; note = 2'-O-methyl modified nucleoside with phosphorothioate linkage
  modified_base 20: mod_base = OTHER; note = 2'-O-methyl modified nucleoside with phosphorothioate linkage
  modified_base 21: mod_base = OTHER; note = 2'-O-methyl modified nucleoside
tacatctcgctcttgaatatt

SEQ ID NO: 13753 - RNA, 21 nt, synthetic construct
  source 1..21: mol_type = other RNA
  modified_base 1: mod_base = OTHER; note = 2'-O-methyl modified nucleoside with phosphorothioate linkage
  modified_base 2: mod_base = OTHER; note = 2'-fluoro-modified nucleoside with phosphorothioate linkage
  modified_base 3: mod_base = OTHER; note = 2'-O-methyl modified nucleoside
  modified_base 4: mod_base = OTHER; note = 2'-fluoro-modified nucleoside
  modified_base 5: mod_base = OTHER; note = 2'-O-methyl modified nucleoside
  modified_base 6: mod_base = OTHER; note = 2'-fluoro-modified nucleoside
  modified_base 7: mod_base = OTHER; note = 2'-O-methyl modified nucleoside
  modified_base 8: mod_base = OTHER; note = 2'-fluoro-modified nucleoside
  modified_base 9: mod_base = OTHER; note = 2'-O-methyl modified nucleoside
  modified_base 10: mod_base = OTHER; note = 2'-fluoro-modified nucleoside
  modified_base 11: mod_base = OTHER; note = 2'-O-methyl modified nucleoside
  modified_base 12: mod_base = OTHER; note = 2'-fluoro-modified nucleoside
  modified_base 13: mod_base = OTHER; note = 2'-O-methyl modified nucleoside
  modified_base 14: mod_base = OTHER; note = 2'-fluoro-modified nucleoside
  modified_base 15: mod_base = OTHER; note = 2'-O-methyl modified nucleoside
  modified_base 16: mod_base = OTHER; note = 2'-fluoro-modified nucleoside
  modified_base 17: mod_base = OTHER; note = 2'-O-methyl modified nucleoside
  modified_base 18: mod_base = OTHER; note = 2'-fluoro-modified nucleoside
  modified_base 19: mod_base = OTHER; note = 2'-O-methyl modified nucleoside with phosphorothioate linkage
  modified_base 20: mod_base = OTHER; note = 2'-O-methyl modified nucleoside with phosphorothioate linkage
  modified_base 21: mod_base = OTHER; note = 2'-O-methyl modified nucleoside
tacatctcgctcttgaatatt

SEQ ID NO: 13754 - RNA, 21 nt, synthetic construct
  source 1..21: mol_type = other RNA
  modified_base 1: mod_base = OTHER; note = 2'-O-methyl modified nucleoside with phosphorothioate linkage
  modified_base 2: mod_base = OTHER; note = 2'-fluoro-modified nucleoside with phosphorothioate linkage
  modified_base 3: mod_base = OTHER; note = 2'-O-methyl modified nucleoside
  modified_base 4: mod_base = OTHER; note = 2'-fluoro-modified nucleoside
  modified_base 5: mod_base = OTHER; note = 2'-O-methyl modified nucleoside
  modified_base 6: mod_base = OTHER; note = 2'-fluoro-modified nucleoside
  modified_base 7: mod_base = OTHER; note = 2'-O-methyl modified nucleoside
  modified_base 8: mod_base = OTHER; note = 2'-fluoro-modified nucleoside
  modified_base 9: mod_base = OTHER; note = 2'-O-methyl modified nucleoside
  modified_base 10: mod_base = OTHER; note = 2'-fluoro-modified nucleoside
  modified_base 11: mod_base = OTHER; note = 2'-O-methyl modified nucleoside
  modified_base 12: mod_base = OTHER; note = 2'-fluoro-modified nucleoside
  modified_base 13: mod_base = OTHER; note = 2'-O-methyl modified nucleoside
  modified_base 14: mod_base = OTHER; note = 2'-fluoro-modified nucleoside
  modified_base 15: mod_base = OTHER; note = 2'-O-methyl modified nucleoside
  modified_base 16: mod_base = OTHER; note = 2'-fluoro-modified nucleoside
  modified_base 17: mod_base = OTHER; note = 2'-O-methyl modified nucleoside
  modified_base 18: mod_base = OTHER; note = 2'-fluoro-modified nucleoside
  modified_base 19: mod_base = OTHER; note = 2'-O-methyl modified nucleoside with phosphorothioate linkage
  modified_base 20: mod_base = OTHER; note = 2'-O-methyl modified nucleoside with phosphorothioate linkage
  modified_base 21: mod_base = OTHER; note = 2'-O-methyl modified nucleoside
tacatctcgctcttgaatatt

SEQ ID NO: 13755 - RNA, 21 nt, synthetic construct
  source 1..21: mol_type = other RNA
  modified_base 1: mod_base = OTHER; note = 2'-O-methyl modified nucleoside with phosphorothioate linkage
  modified_base 2: mod_base = OTHER; note = 2'-fluoro-modified nucleoside with phosphorothioate linkage
  modified_base 3: mod_base = OTHER; note = 2'-O-methyl modified nucleoside
  modified_base 4: mod_base = OTHER; note = 2'-fluoro-modified nucleoside
  modified_base 5: mod_base = OTHER; note = 2'-O-methyl modified nucleoside
  modified_base 6: mod_base = OTHER; note = 2'-fluoro-modified nucleoside
  modified_base 7: mod_base = OTHER; note = 2'-O-methyl modified nucleoside
  modified_base 8: mod_base = OTHER; note = 2'-fluoro-modified nucleoside
  modified_base 9: mod_base = OTHER; note = 2'-O-methyl modified nucleoside
  modified_base 10: mod_base = OTHER; note = 2'-fluoro-modified nucleoside
  modified_base 11: mod_base = OTHER; note = 2'-O-methyl modified nucleoside
  modified_base 12: mod_base = OTHER; note = 2'-fluoro-modified nucleoside
  modified_base 13: mod_base = OTHER; note = 2'-O-methyl modified nucleoside
  modified_base 14: mod_base = OTHER; note = 2'-fluoro-modified nucleoside
  modified_base 15: mod_base = OTHER; note = 2'-O-methyl modified nucleoside
  modified_base 16: mod_base = OTHER; note = 2'-fluoro-modified nucleoside
  modified_base 17: mod_base = OTHER; note = 2'-O-methyl modified nucleoside
  modified_base 18: mod_base = OTHER; note = 2'-fluoro-modified nucleoside
  modified_base 19: mod_base = OTHER; note = 2'-O-methyl modified nucleoside with phosphorothioate linkage
  modified_base 20: mod_base = OTHER; note = 2'-O-methyl modified nucleoside with phosphorothioate linkage
  modified_base 21: mod_base = OTHER; note = 2'-O-methyl modified nucleoside
tacatctcgctcttgaatatt

SEQ ID NO: 13756 - RNA, 21 nt, synthetic construct
  source 1..21: mol_type = other RNA
  modified_base 1: mod_base = OTHER; note = 2'-O-methyl modified nucleoside with phosphorothioate linkage
  modified_base 2: mod_base = OTHER; note = 2'-fluoro-modified nucleoside with phosphorothioate linkage
  modified_base 3: mod_base = OTHER; note = 2'-O-methyl modified nucleoside
  modified_base 4: mod_base = OTHER; note = 2'-fluoro-modified nucleoside
  modified_base 5: mod_base = OTHER; note = 2'-O-methyl modified nucleoside
  modified_base 6: mod_base = OTHER; note = 2'-fluoro-modified nucleoside
  modified_base 7: mod_base = OTHER; note = 2'-O-methyl modified nucleoside
  modified_base 8: mod_base = OTHER; note = 2'-fluoro-modified nucleoside
  modified_base 9: mod_base = OTHER; note = 2'-O-methyl modified nucleoside
  modified_base 10: mod_base = OTHER; note = 2'-fluoro-modified nucleoside
  modified_base 11: mod_base = OTHER; note = 2'-O-methyl modified nucleoside
  modified_base 12: mod_base = OTHER; note = 2'-fluoro-modified nucleoside
  modified_base 13: mod_base = OTHER; note = 2'-O-methyl modified nucleoside
  modified_base 14: mod_base = OTHER; note = 2'-fluoro-modified nucleoside
  modified_base 15: mod_base = OTHER; note = 2'-O-methyl modified nucleoside
  modified_base 16: mod_base = OTHER; note = 2'-fluoro-modified nucleoside
  modified_base 17: mod_base = OTHER; note = 2'-O-methyl modified nucleoside
  modified_base 18: mod_base = OTHER; note = 2'-O-methyl modified nucleoside
  modified_base 19: mod_base = OTHER; note = 2'-O-methyl modified nucleoside with phosphorothioate linkage
  modified_base 20: mod_base = OTHER; note = 2'-O-methyl modified nucleoside with phosphorothioate linkage
  modified_base 21: mod_base = OTHER; note = 2'-O-methyl modified nucleoside
tacatctcgctcttgaatatt

SEQ ID NO: 13757 - RNA, 21 nt, synthetic construct
  source 1..21: mol_type = other RNA
  modified_base 1: mod_base = OTHER; note = 2'-O-methyl modified nucleoside with phosphorothioate linkage
  modified_base 2: mod_base = OTHER; note = 2'-fluoro-modified nucleoside with phosphorothioate linkage
  modified_base 3: mod_base = OTHER; note = 2'-O-methyl modified nucleoside
  modified_base 4: mod_base = OTHER; note = 2'-O-methyl modified nucleoside
  modified_base 5: mod_base = OTHER; note = 2'-O-methyl modified nucleoside
  modified_base 6: mod_base = OTHER; note = 2'-fluoro-modified nucleoside
  modified_base 7: mod_base = OTHER; note = 2'-O-methyl modified nucleoside
  modified_base 8: mod_base = OTHER; note = 2'-fluoro-modified nucleoside
  modified_base 9: mod_base = OTHER; note = 2'-O-methyl modified nucleoside
  modified_base 10: mod_base = OTHER; note = 2'-fluoro-modified nucleoside
  modified_base 11: mod_base = OTHER; note = 2'-O-methyl modified nucleoside
  modified_base 12: mod_base = OTHER; note = 2'-fluoro-modified nucleoside
  modified_base 13: mod_base = OTHER; note = 2'-O-methyl modified nucleoside
  modified_base 14: mod_base = OTHER; note = 2'-fluoro-modified nucleoside
  modified_base 15: mod_base = OTHER; note = 2'-O-methyl modified nucleoside
  modified_base 16: mod_base = OTHER; note = 2'-fluoro-modified nucleoside
  modified_base 17: mod_base = OTHER; note = 2'-O-methyl modified nucleoside
  modified_base 18: mod_base = OTHER; note = 2'-fluoro-modified nucleoside
  modified_base 19: mod_base = OTHER; note = 2'-O-methyl modified nucleoside with phosphorothioate linkage
  modified_base 20: mod_base = OTHER; note = 2'-O-methyl modified nucleoside with phosphorothioate linkage
  modified_base 21: mod_base = OTHER; note = 2'-O-methyl modified nucleoside
tacatctcgctcttgaatatt

SEQ ID NO: 13758 - RNA, 21 nt, synthetic construct
  source 1..21: mol_type = other RNA
  modified_base 1: mod_base = OTHER; note = 2'-O-methyl modified nucleoside with phosphorothioate linkage
  modified_base 2: mod_base = OTHER; note = 2'-fluoro-modified nucleoside with phosphorothioate linkage
  modified_base 3: mod_base = OTHER; note = 2'-O-methyl modified nucleoside
  modified_base 4: mod_base = OTHER; note = 2'-O-methyl modified nucleoside
  modified_base 5: mod_base = OTHER; note = 2'-O-methyl modified nucleoside
  modified_base 6: mod_base = OTHER; note = 2'-fluoro-modified nucleoside
  modified_base 7: mod_base = OTHER; note = 2'-O-methyl modified nucleoside
  modified_base 8: mod_base = OTHER; note = 2'-O-methyl modified nucleoside
  modified_base 9: mod_base = OTHER; note = 2'-O-methyl modified nucleoside
  modified_base 10: mod_base = OTHER; note = 2'-fluoro-modified nucleoside
  modified_base 11: mod_base = OTHER; note = 2'-O-methyl modified nucleoside
  modified_base 12: mod_base = OTHER; note = 2'-fluoro-modified nucleoside
  modified_base 13: mod_base = OTHER; note = 2'-O-methyl modified nucleoside
  modified_base 14: mod_base = OTHER; note = 2'-fluoro-modified nucleoside
  modified_base 15: mod_base = OTHER; note = 2'-O-methyl modified nucleoside
  modified_base 16: mod_base = OTHER; note = 2'-fluoro-modified nucleoside
  modified_base 17: mod_base = OTHER; note = 2'-O-methyl modified nucleoside
  modified_base 18: mod_base = OTHER; note = 2'-fluoro-modified nucleoside
  modified_base 19: mod_base = OTHER; note = 2'-O-methyl modified nucleoside with phosphorothioate linkage
  modified_base 20: mod_base = OTHER; note = 2'-O-methyl modified nucleoside with phosphorothioate linkage
  modified_base 21: mod_base = OTHER; note = 2'-O-methyl modified nucleoside
tacatctcgctcttgaatatt

SEQ ID NO: 13759 - RNA, 21 nt, synthetic construct
  source 1..21: mol_type = other RNA
  modified_base 1: mod_base = OTHER; note = 2'-O-methyl modified nucleoside with phosphorothioate linkage
  modified_base 2: mod_base = OTHER; note = 2'-fluoro-modified nucleoside with phosphorothioate linkage
  modified_base 3: mod_base = OTHER; note = 2'-O-methyl modified nucleoside
  modified_base 4: mod_base = OTHER; note = 2'-O-methyl modified nucleoside
  modified_base 5: mod_base = OTHER; note = 2'-O-methyl modified nucleoside
  modified_base 6: mod_base = OTHER; note = 2'-fluoro-modified nucleoside
  modified_base 7: mod_base = OTHER; note = 2'-fluoro-modified nucleoside
  modified_base 8: mod_base = OTHER; note = 2'-O-methyl modified nucleoside
  modified_base 9: mod_base = OTHER; note = 2'-O-methyl modified nucleoside
  modified_base 10: mod_base = OTHER; note = 2'-fluoro-modified nucleoside
  modified_base 11: mod_base = OTHER; note = 2'-O-methyl modified nucleoside
  modified_base 12: mod_base = OTHER; note = 2'-fluoro-modified nucleoside
  modified_base 13: mod_base = OTHER; note = 2'-O-methyl modified nucleoside
  modified_base 14: mod_base = OTHER; note = 2'-fluoro-modified nucleoside
  modified_base 15: mod_base = OTHER; note = 2'-O-methyl modified nucleoside
  modified_base 16: mod_base = OTHER; note = 2'-fluoro-modified nucleoside
  modified_base 17: mod_base = OTHER; note = 2'-O-methyl modified nucleoside
  modified_base 18: mod_base = OTHER; note = 2'-fluoro-modified nucleoside
  modified_base 19: mod_base = OTHER; note = 2'-O-methyl modified nucleoside with phosphorothioate linkage
  modified_base 20: mod_base = OTHER; note = 2'-O-methyl modified nucleoside with phosphorothioate linkage
  modified_base 21: mod_base = OTHER; note = 2'-O-methyl modified nucleoside
tacatctcgctcttgaatatt

SEQ ID NO: 13760 - RNA, 21 nt, synthetic construct
  source 1..21: mol_type = other RNA
  modified_base 1: mod_base = OTHER; note = 2'-O-methyl modified nucleoside with phosphorothioate linkage
  modified_base 2: mod_base = OTHER; note = 2'-fluoro-modified nucleoside with phosphorothioate linkage
  modified_base 3: mod_base = OTHER; note = 2'-O-methyl modified nucleoside
  modified_base 4: mod_base = OTHER; note = 2'-O-methyl modified nucleoside
  modified_base 5: mod_base = OTHER; note = 2'-fluoro-modified nucleoside
  modified_base 6: mod_base = OTHER; note = 2'-O-methyl modified nucleoside
  modified_base 7: mod_base = OTHER; note = 2'-fluoro-modified nucleoside
  modified_base 8: mod_base = OTHER; note = 2'-O-methyl modified nucleoside
  modified_base 9: mod_base = OTHER; note = 2'-O-methyl modified nucleoside
  modified_base 10: mod_base = OTHER; note = 2'-fluoro-modified nucleoside
  modified_base 11: mod_base = OTHER; note = 2'-O-methyl modified nucleoside
  modified_base 12: mod_base = OTHER; note = 2'-fluoro-modified nucleoside
  modified_base 13: mod_base = OTHER; note = 2'-O-methyl modified nucleoside
  modified_base 14: mod_base = OTHER; note = 2'-fluoro-modified nucleoside
  modified_base 15: mod_base = OTHER; note = 2'-O-methyl modified nucleoside
  modified_base 16: mod_base = OTHER; note = 2'-fluoro-modified nucleoside
  modified_base 17: mod_base = OTHER; note = 2'-O-methyl modified nucleoside
  modified_base 18: mod_base = OTHER; note = 2'-fluoro-modified nucleoside
  modified_base 19: mod_base = OTHER; note = 2'-O-methyl modified nucleoside with phosphorothioate linkage
  modified_base 20: mod_base = OTHER; note = 2'-O-methyl modified nucleoside with phosphorothioate linkage
  modified_base 21: mod_base = OTHER; note = 2'-O-methyl modified nucleoside
tacatctcgctcttgaatatt

SEQ ID NO: 13761 - RNA, 21 nt, synthetic construct
  source 1..21: mol_type = other RNA
  modified_base 1: mod_base = OTHER; note = 2'-O-methyl modified nucleoside with phosphorothioate linkage
  modified_base 2: mod_base = OTHER; note = 2'-fluoro-modified nucleoside with phosphorothioate linkage
  modified_base 3: mod_base = OTHER; note = 2'-O-methyl modified nucleoside
  modified_base 4: mod_base = OTHER; note = 2'-O-methyl modified nucleoside
  modified_base 5: mod_base = OTHER; note = 2'-fluoro-modified nucleoside
  modified_base 6: mod_base = OTHER; note = 2'-O-methyl modified nucleoside
  modified_base 7: mod_base = OTHER; note = 2'-fluoro-modified nucleoside
  modified_base 8: mod_base = OTHER; note = 2'-fluoro-modified nucleoside
  modified_base 9: mod_base = OTHER; note = 2'-O-methyl modified nucleoside
  modified_base 10: mod_base = OTHER; note = 2'-fluoro-modified nucleoside
  modified_base 11: mod_base = OTHER; note = 2'-O-methyl modified nucleoside
  modified_base 12: mod_base = OTHER; note = 2'-fluoro-modified nucleoside
  modified_base 13: mod_base = OTHER; note = 2'-O-methyl modified nucleoside
  modified_base 14: mod_base = OTHER; note = 2'-fluoro-modified nucleoside
  modified_base 15: mod_base = OTHER; note = 2'-O-methyl modified nucleoside
  modified_base 16: mod_base = OTHER; note = 2'-fluoro-modified nucleoside
  modified_base 17: mod_base = OTHER; note = 2'-O-methyl modified nucleoside
  modified_base 18: mod_base = OTHER; note = 2'-fluoro-modified nucleoside
  modified_base 19: mod_base = OTHER; note = 2'-O-methyl modified nucleoside with phosphorothioate linkage
  modified_base 20: mod_base = OTHER; note = 2'-O-methyl modified nucleoside with phosphorothioate linkage
  modified_base 21: mod_base = OTHER; note = 2'-O-methyl modified nucleoside
tacatctcgctcttgaatatt

SEQ ID NO: 13762 - RNA, 21 nt, synthetic construct
  source 1..21: mol_type = other RNA
  modified_base 1: mod_base = OTHER; note = 2'-O-methyl modified nucleoside with phosphorothioate linkage
  modified_base 2: mod_base = OTHER; note = 2'-fluoro-modified nucleoside with phosphorothioate linkage
  modified_base 3: mod_base = OTHER; note = 2'-O-methyl modified nucleoside
  modified_base 4: mod_base = OTHER; note = 2'-O-methyl modified nucleoside
  modified_base 5: mod_base = OTHER; note = 2'-fluoro-modified nucleoside
  modified_base 6: mod_base = OTHER; note = 2'-O-methyl modified nucleoside
  modified_base 7: mod_base = OTHER; note = 2'-fluoro-modified nucleoside
  modified_base 8: mod_base = OTHER; note = 2'-fluoro-modified nucleoside
  modified_base 9: mod_base = OTHER; note = 2'-O-methyl modified nucleoside
  modified_base 10: mod_base = OTHER; note = 2'-O-methyl modified nucleoside
  modified_base 11: mod_base = OTHER; note = 2'-O-methyl modified nucleoside
  modified_base 12: mod_base = OTHER; note = 2'-fluoro-modified nucleoside
  modified_base 13: mod_base = OTHER; note = 2'-O-methyl modified nucleoside
  modified_base 14: mod_base = OTHER; note = 2'-fluoro-modified nucleoside
  modified_base 15: mod_base = OTHER; note = 2'-O-methyl modified nucleoside
  modified_base 16: mod_base = OTHER; note = 2'-fluoro-modified nucleoside
  modified_base 17: mod_base = OTHER; note = 2'-O-methyl modified nucleoside
  modified_base 18: mod_base = OTHER; note = 2'-fluoro-modified nucleoside
  modified_base 19: mod_base = OTHER; note = 2'-O-methyl modified nucleoside with phosphorothioate linkage
  modified_base 20: mod_base = OTHER; note = 2'-O-methyl modified nucleoside with phosphorothioate linkage
  modified_base 21: mod_base = OTHER; note = 2'-O-methyl modified nucleoside
tacatctcgctcttgaatatt

SEQ ID NO: 13763 - RNA, 21 nt, synthetic construct
  source 1..21: mol_type = other RNA
  modified_base 1: mod_base = OTHER; note = 2'-O-methyl modified nucleoside with phosphorothioate linkage
  modified_base 2: mod_base = OTHER; note = 2'-fluoro-modified nucleoside with phosphorothioate linkage
  modified_base 3: mod_base = OTHER; note = 2'-O-methyl modified nucleoside
  modified_base 4: mod_base = OTHER; note = 2'-O-methyl modified nucleoside
  modified_base 5: mod_base = OTHER; note = 2'-fluoro-modified nucleoside
  modified_base 6: mod_base = OTHER; note = 2'-O-methyl modified nucleoside
  modified_base 7: mod_base = OTHER; note = 2'-fluoro-modified nucleoside
  modified_base 8: mod_base = OTHER; note = 2'-O-methyl modified nucleoside
  modified_base 9: mod_base = OTHER; note = 2'-fluoro-modified nucleoside
  modified_base 10: mod_base = OTHER; note = 2'-O-methyl modified nucleoside
  modified_base 11: mod_base = OTHER; note = 2'-O-methyl modified nucleoside
  modified_base 12: mod_base = OTHER; note = 2'-fluoro-modified nucleoside
  modified_base 13: mod_base = OTHER; note = 2'-O-methyl modified nucleoside
  modified_base 14: mod_base = OTHER; note = 2'-fluoro-modified nucleoside
  modified_base 15: mod_base = OTHER; note = 2'-O-methyl modified nucleoside
  modified_base 16: mod_base = OTHER; note = 2'-fluoro-modified nucleoside
  modified_base 17: mod_base = OTHER; note = 2'-O-methyl modified nucleoside
  modified_base 18: mod_base = OTHER; note = 2'-fluoro-modified nucleoside
  modified_base 19: mod_base = OTHER; note = 2'-O-methyl modified nucleoside with phosphorothioate linkage
  modified_base 20: mod_base = OTHER; note = 2'-O-methyl modified nucleoside with phosphorothioate linkage
  modified_base 21: mod_base = OTHER; note = 2'-O-methyl modified nucleoside
tacatctcgctcttgaatatt

SEQ ID NO: 13764 - RNA, 21 nt, synthetic construct
  source 1..21: mol_type = other RNA
  modified_base 1: mod_base = OTHER; note = 2'-O-methyl modified nucleoside with phosphorothioate linkage
  modified_base 2: mod_base = OTHER; note = 2'-fluoro-modified nucleoside with phosphorothioate linkage
  modified_base 3: mod_base = OTHER; note = 2'-O-methyl modified nucleoside
  modified_base 4: mod_base = OTHER; note = 2'-fluoro-modified nucleoside
  modified_base 5: mod_base = OTHER; note = 2'-O-methyl modified nucleoside
  modified_base 6: mod_base = OTHER; note = 2'-fluoro-modified nucleoside
  modified_base 7: mod_base = OTHER; note = 2'-O-methyl modified nucleoside
  modified_base 8: mod_base = OTHER; note = 2'-fluoro-modified nucleoside
  modified_base 9: mod_base = OTHER; note = 2'-O-methyl modified nucleoside
  modified_base 10: mod_base = OTHER; note = 2'-fluoro-modified nucleoside
  modified_base 11: mod_base = OTHER; note = 2'-O-methyl modified nucleoside
  modified_base 12: mod_base = OTHER; note = 2'-fluoro-modified nucleoside
  modified_base 13: mod_base = OTHER; note = 2'-O-methyl modified nucleoside
  modified_base 14: mod_base = OTHER; note = 2'-fluoro-modified nucleoside
  modified_base 15: mod_base = OTHER; note = 2'-O-methyl modified nucleoside
  modified_base 16: mod_base = OTHER; note = 2'-fluoro-modified nucleoside
  modified_base 17: mod_base = OTHER; note = 2'-O-methyl modified nucleoside
  modified_base 18: mod_base = OTHER; note = 2'-fluoro-modified nucleoside
  modified_base 19: mod_base = OTHER; note = 2'-O-methyl modified nucleoside with phosphorothioate linkage
  modified_base 20: mod_base = OTHER; note = 2'-O-methyl modified nucleoside with phosphorothioate linkage
  modified_base 21: mod_base = OTHER; note = 2'-O-methyl modified nucleoside
tttattgcctgaagcaatgtt

SEQ ID NO: 13765 - RNA, 21 nt, synthetic construct
  source 1..21: mol_type = other RNA
  modified_base 1: mod_base = OTHER; note = 2'-O-methyl modified nucleoside with phosphorothioate linkage
  modified_base 2: mod_base = OTHER; note = 2'-fluoro-modified nucleoside with phosphorothioate linkage
  modified_base 3: mod_base = OTHER; note = 2'-O-methyl modified nucleoside
  modified_base 4: mod_base = OTHER; note = 2'-fluoro-modified nucleoside
  modified_base 5: mod_base = OTHER; note = 2'-O-methyl modified nucleoside
  modified_base 6: mod_base = OTHER; note = 2'-fluoro-modified nucleoside
  modified_base 7: mod_base = OTHER; note = 2'-O-methyl modified nucleoside
  modified_base 8: mod_base = OTHER; note = 2'-fluoro-modified nucleoside
  modified_base 9: mod_base = OTHER; note = 2'-O-methyl modified nucleoside
  modified_base 10: mod_base = OTHER; note = 2'-fluoro-modified nucleoside
  modified_base 11: mod_base = OTHER; note = 2'-O-methyl modified nucleoside
  modified_base 12: mod_base = OTHER; note = 2'-fluoro-modified nucleoside
  modified_base 13: mod_base = OTHER; note = 2'-O-methyl modified nucleoside
  modified_base 14: mod_base = OTHER; note = 2'-fluoro-modified nucleoside
  modified_base 15: mod_base = OTHER; note = 2'-O-methyl modified nucleoside
  modified_base 16: mod_base = OTHER; note = 2'-fluoro-modified nucleoside
  modified_base 17: mod_base = OTHER; note = 2'-O-methyl modified nucleoside
  modified_base 18: mod_base = OTHER; note = 2'-fluoro-modified nucleoside
  modified_base 19: mod_base = OTHER; note = 2'-O-methyl modified nucleoside with phosphorothioate linkage
  modified_base 20: mod_base = OTHER; note = 2'-O-methyl modified nucleoside with phosphorothioate linkage
  modified_base 21: mod_base = OTHER; note = 2'-O-methyl modified nucleoside
tttattgcctgaagcaatgtt

SEQ ID NO: 13766 - RNA, 21 nt, synthetic construct
  source 1..21: mol_type = other RNA
  modified_base 1: mod_base = OTHER; note = 2'-O-methyl modified nucleoside with phosphorothioate linkage
  modified_base 2: mod_base = OTHER; note = 2'-fluoro-modified nucleoside with phosphorothioate linkage
  modified_base 3: mod_base = OTHER; note = 2'-O-methyl modified nucleoside
  modified_base 4: mod_base = OTHER; note = 2'-fluoro-modified nucleoside
  modified_base 5: mod_base = OTHER; note = 2'-O-methyl modified nucleoside
  modified_base 6: mod_base = OTHER; note = 2'-fluoro-modified nucleoside
  modified_base 7: mod_base = OTHER; note = 2'-O-methyl modified nucleoside
  modified_base 8: mod_base = OTHER; note = 2'-fluoro-modified nucleoside
  modified_base 9: mod_base = OTHER; note = 2'-O-methyl modified nucleoside
  modified_base 10: mod_base = OTHER; note = 2'-fluoro-modified nucleoside
  modified_base 11: mod_base = OTHER; note = 2'-O-methyl modified nucleoside
  modified_base 12: mod_base = OTHER; note = 2'-fluoro-modified nucleoside
  modified_base 13: mod_base = OTHER; note = 2'-O-methyl modified nucleoside
  modified_base 14: mod_base = OTHER; note = 2'-fluoro-modified nucleoside
  modified_base 15: mod_base = OTHER; note = 2'-O-methyl modified nucleoside
  modified_base 16: mod_base = OTHER; note = 2'-fluoro-modified nucleoside
  modified_base 17: mod_base = OTHER; note = 2'-O-methyl modified nucleoside
  modified_base 18: mod_base = OTHER; note = 2'-fluoro-modified nucleoside
  modified_base 19: mod_base = OTHER; note = 2'-O-methyl modified nucleoside with phosphorothioate linkage
  modified_base 20: mod_base = OTHER; note = 2'-O-methyl modified nucleoside with phosphorothioate linkage
  modified_base 21: mod_base = OTHER; note = 2'-O-methyl modified nucleoside
tttattgcctgaagcaatgtt

SEQ ID NO: 13767 - RNA, 21 nt, synthetic construct
  source 1..21: mol_type = other RNA
  modified_base 1: mod_base = OTHER; note = 2'-O-methyl modified nucleoside with phosphorothioate linkage
  modified_base 2: mod_base = OTHER; note = 2'-fluoro-modified nucleoside with phosphorothioate linkage
  modified_base 3: mod_base = OTHER; note = 2'-O-methyl modified nucleoside
  modified_base 4: mod_base = OTHER; note = 2'-fluoro-modified nucleoside
  modified_base 5: mod_base = OTHER; note = 2'-O-methyl modified nucleoside
  modified_base 6: mod_base = OTHER; note = 2'-fluoro-modified nucleoside
  modified_base 7: mod_base = OTHER; note = 2'-O-methyl modified nucleoside
  modified_base 8: mod_base = OTHER; note = 2'-fluoro-modified nucleoside
  modified_base 9: mod_base = OTHER; note = 2'-O-methyl modified nucleoside
  modified_base 10: mod_base = OTHER; note = 2'-fluoro-modified nucleoside
  modified_base 11: mod_base = OTHER; note = 2'-O-methyl modified nucleoside
  modified_base 12: mod_base = OTHER; note = 2'-fluoro-modified nucleoside
  modified_base 13: mod_base = OTHER; note = 2'-O-methyl modified nucleoside
  modified_base 14: mod_base = OTHER; note = 2'-fluoro-modified nucleoside
  modified_base 15: mod_base = OTHER; note = 2'-O-methyl modified nucleoside
  modified_base 16: mod_base = OTHER; note = 2'-fluoro-modified nucleoside
  modified_base 17: mod_base = OTHER; note = 2'-O-methyl modified nucleoside
  modified_base 18: mod_base = OTHER; note = 2'-fluoro-modified nucleoside
  modified_base 19: mod_base = OTHER; note = 2'-O-methyl modified nucleoside with phosphorothioate linkage
  modified_base 20: mod_base = OTHER; note = 2'-O-methyl modified nucleoside with phosphorothioate linkage
  modified_base 21: mod_base = OTHER; note = 2'-O-methyl modified nucleoside
tttattgcctgaagcaatgtt

SEQ ID NO: 13768 - RNA, 21 nt, synthetic construct
  source 1..21: mol_type = other RNA
  modified_base 1: mod_base = OTHER; note = 2'-O-methyl modified nucleoside with phosphorothioate linkage
  modified_base 2: mod_base = OTHER; note = 2'-fluoro-modified nucleoside with phosphorothioate linkage
  modified_base 3: mod_base = OTHER; note = 2'-O-methyl modified nucleoside
  modified_base 4: mod_base = OTHER; note = 2'-fluoro-modified nucleoside
  modified_base 5: mod_base = OTHER; note = 2'-O-methyl modified nucleoside
  modified_base 6: mod_base = OTHER; note = 2'-fluoro-modified nucleoside
  modified_base 7: mod_base = OTHER; note = 2'-O-methyl modified nucleoside
  modified_base 8: mod_base = OTHER; note = 2'-fluoro-modified nucleoside
  modified_base 9: mod_base = OTHER; note = 2'-O-methyl modified nucleoside
  modified_base 10: mod_base = OTHER; note = 2'-fluoro-modified nucleoside
  modified_base 11: mod_base = OTHER; note = 2'-O-methyl modified nucleoside
  modified_base 12: mod_base = OTHER; note = 2'-fluoro-modified nucleoside
  modified_base 13: mod_base = OTHER; note = 2'-O-methyl modified nucleoside
  modified_base 14: mod_base = OTHER; note = 2'-fluoro-modified nucleoside
  modified_base 15: mod_base = OTHER; note = 2'-O-methyl modified nucleoside
  modified_base 16: mod_base = OTHER; note = 2'-fluoro-modified nucleoside
  modified_base 17: mod_base = OTHER; note = 2'-O-methyl modified nucleoside
  modified_base 18: mod_base = OTHER; note = 2'-O-methyl modified nucleoside
  modified_base 19: mod_base = OTHER; note = 2'-O-methyl modified nucleoside with phosphorothioate linkage
  modified_base 20: mod_base = OTHER; note = 2'-O-methyl modified nucleoside with phosphorothioate linkage
  modified_base 21: mod_base = OTHER; note = 2'-O-methyl modified nucleoside
tttattgcctgaagcaatgtt

SEQ ID NO: 13769 - RNA, 21 nt, synthetic construct
  source 1..21: mol_type = other RNA
  modified_base 1: mod_base = OTHER; note = 2'-O-methyl modified nucleoside with phosphorothioate linkage
  modified_base 2: mod_base = OTHER; note = 2'-fluoro-modified nucleoside with phosphorothioate linkage
  modified_base 3: mod_base = OTHER; note = 2'-O-methyl modified nucleoside
  modified_base 4: mod_base = OTHER; note = 2'-O-methyl modified nucleoside
  modified_base 5: mod_base = OTHER; note = 2'-O-methyl modified nucleoside
  modified_base 6: mod_base = OTHER; note = 2'-fluoro-modified nucleoside
  modified_base 7: mod_base = OTHER; note = 2'-O-methyl modified nucleoside
  modified_base 8: mod_base = OTHER; note = 2'-fluoro-modified nucleoside
  modified_base 9: mod_base = OTHER; note = 2'-O-methyl modified nucleoside
  modified_base 10: mod_base = OTHER; note = 2'-fluoro-modified nucleoside
  modified_base 11: mod_base = OTHER; note = 2'-O-methyl modified nucleoside
  modified_base 12: mod_base = OTHER; note = 2'-fluoro-modified nucleoside
  modified_base 13: mod_base = OTHER; note = 2'-O-methyl modified nucleoside
  modified_base 14: mod_base = OTHER; note = 2'-fluoro-modified nucleoside
  modified_base 15: mod_base = OTHER; note = 2'-O-methyl modified nucleoside
  modified_base 16: mod_base = OTHER; note = 2'-fluoro-modified nucleoside
  modified_base 17: mod_base = OTHER; note = 2'-O-methyl modified nucleoside
  modified_base 18: mod_base = OTHER; note = 2'-fluoro-modified nucleoside
  modified_base 19: mod_base = OTHER; note = 2'-O-methyl modified nucleoside with phosphorothioate linkage
  modified_base 20: mod_base = OTHER; note = 2'-O-methyl modified nucleoside with phosphorothioate linkage
  modified_base 21: mod_base = OTHER; note = 2'-O-methyl modified nucleoside
tttattgcctgaagcaatgtt

SEQ ID NO: 13770 - RNA, 21 nt, synthetic construct
  source 1..21: mol_type = other RNA
  modified_base 1: mod_base = OTHER; note = 2'-O-methyl modified nucleoside with phosphorothioate linkage
  modified_base 2: mod_base = OTHER; note = 2'-fluoro-modified nucleoside with phosphorothioate linkage
  modified_base 3: mod_base = OTHER; note = 2'-O-methyl modified nucleoside
  modified_base 4: mod_base = OTHER; note = 2'-O-methyl modified nucleoside
  modified_base 5: mod_base = OTHER; note = 2'-O-methyl modified nucleoside
  modified_base 6: mod_base = OTHER; note = 2'-fluoro-modified nucleoside
  modified_base 7: mod_base = OTHER; note = 2'-fluoro-modified nucleoside
  modified_base 8: mod_base = OTHER; note = 2'-O-methyl modified nucleoside
  modified_base 9: mod_base = OTHER; note = 2'-O-methyl modified nucleoside
  modified_base 10: mod_base = OTHER; note = 2'-fluoro-modified nucleoside
  modified_base 11: mod_base = OTHER; note = 2'-O-methyl modified nucleoside
  modified_base 12: mod_base = OTHER; note = 2'-fluoro-modified nucleoside
  modified_base 13: mod_base = OTHER; note = 2'-O-methyl modified nucleoside
  modified_base 14: mod_base = OTHER; note = 2'-fluoro-modified nucleoside
  modified_base 15: mod_base = OTHER; note = 2'-O-methyl modified nucleoside
  modified_base 16: mod_base = OTHER; note = 2'-fluoro-modified nucleoside
  modified_base 17: mod_base = OTHER; note = 2'-O-methyl modified nucleoside
  modified_base 18: mod_base = OTHER; note = 2'-fluoro-modified nucleoside
  modified_base 19: mod_base = OTHER; note = 2'-O-methyl modified nucleoside with phosphorothioate linkage
  modified_base 20: mod_base = OTHER; note = 2'-O-methyl modified nucleoside with phosphorothioate linkage
  modified_base 21: mod_base = OTHER; note = 2'-O-methyl modified nucleoside
tttattgcctgaagcaatgtt

SEQ ID NO: 13771 - RNA, 21 nt, synthetic construct
  source 1..21: mol_type = other RNA
  modified_base 1: mod_base = OTHER; note = 2'-O-methyl modified nucleoside with phosphorothioate linkage
  modified_base 2: mod_base = OTHER; note = 2'-fluoro-modified nucleoside with phosphorothioate linkage
  modified_base 3: mod_base = OTHER; note = 2'-O-methyl modified nucleoside
  modified_base 4: mod_base = OTHER; note = 2'-O-methyl modified nucleoside
  modified_base 5: mod_base = OTHER; note = 2'-O-methyl modified nucleoside
  modified_base 6: mod_base = OTHER; note = 2'-fluoro-modified nucleoside
  modified_base 7: mod_base = OTHER; note = 2'-fluoro-modified nucleoside
  modified_base 8: mod_base = OTHER; note = 2'-O-methyl modified nucleoside
  modified_base 9: mod_base = OTHER; note = 2'-fluoro-modified nucleoside
  modified_base 10: mod_base = OTHER; note = 2'-O-methyl modified nucleoside
  modified_base 11: mod_base = OTHER; note = 2'-O-methyl modified nucleoside
  modified_base 12: mod_base = OTHER; note = 2'-O-methyl modified nucleoside
  modified_base 13: mod_base = OTHER; note = 2'-O-methyl modified nucleoside
  modified_base 14: mod_base = OTHER; note = 2'-fluoro-modified nucleoside
  modified_base 15: mod_base = OTHER; note = 2'-O-methyl modified nucleoside
  modified_base 16: mod_base = OTHER; note = 2'-fluoro-modified nucleoside
  modified_base 17: mod_base = OTHER; note = 2'-O-methyl modified nucleoside
  modified_base 18: mod_base = OTHER; note = 2'-fluoro-modified nucleoside
  modified_base 19: mod_base = OTHER; note = 2'-O-methyl modified nucleoside with phosphorothioate linkage
  modified_base 20: mod_base = OTHER; note = 2'-O-methyl modified nucleoside with phosphorothioate linkage
  modified_base 21: mod_base = OTHER; note = 2'-O-methyl modified nucleoside
tttattgcctgaagcaatgtt

SEQ ID NO: 13772 - RNA, 21 nt, synthetic construct
  source 1..21: mol_type = other RNA
  modified_base 1: mod_base = OTHER; note = 2'-O-methyl modified nucleoside with phosphorothioate linkage
  modified_base 2: mod_base = OTHER; note = 2'-fluoro-modified nucleoside with phosphorothioate linkage
  modified_base 3: mod_base = OTHER; note = 2'-O-methyl modified nucleoside
  modified_base 4: mod_base = OTHER; note = 2'-O-methyl modified nucleoside
  modified_base 5: mod_base = OTHER; note = 2'-O-methyl modified nucleoside
  modified_base 6: mod_base = OTHER; note = 2'-O-methyl modified nucleoside
  modified_base 7: mod_base = OTHER; note = 2'-fluoro-modified nucleoside
  modified_base 8: mod_base = OTHER; note = 2'-O-methyl modified nucleoside
  modified_base 9: mod_base = OTHER; note = 2'-fluoro-modified nucleoside
  modified_base 10: mod_base = OTHER; note = 2'-O-methyl modified nucleoside
  modified_base 11: mod_base = OTHER; note = 2'-O-methyl modified nucleoside
  modified_base 12: mod_base = OTHER; note = 2'-O-methyl modified nucleoside
  modified_base 13: mod_base = OTHER; note = 2'-O-methyl modified nucleoside
  modified_base 14: mod_base = OTHER; note = 2'-fluoro-modified nucleoside
  modified_base 15: mod_base = OTHER; note = 2'-O-methyl modified nucleoside
  modified_base 16: mod_base = OTHER; note = 2'-fluoro-modified nucleoside
  modified_base 17: mod_base = OTHER; note = 2'-O-methyl modified nucleoside
  modified_base 18: mod_base = OTHER; note = 2'-fluoro-modified nucleoside
  modified_base 19: mod_base = OTHER; note = 2'-O-methyl modified nucleoside with phosphorothioate linkage
  modified_base 20: mod_base = OTHER; note = 2'-O-methyl modified nucleoside with phosphorothioate linkage
  modified_base 21: mod_base = OTHER; note = 2'-O-methyl modified nucleoside
tttattgcctgaagcaatgtt

SEQ ID NO: 13773 - RNA, 21 nt, synthetic construct
  source 1..21: mol_type = other RNA
  modified_base 1: mod_base = OTHER; note = 2'-O-methyl modified nucleoside with phosphorothioate linkage
  modified_base 2: mod_base = OTHER; note = 2'-fluoro-modified nucleoside with phosphorothioate linkage
  modified_base 3: mod_base = OTHER; note = 2'-O-methyl modified nucleoside
  modified_base 4: mod_base = OTHER; note = 2'-O-methyl modified nucleoside
  modified_base 5: mod_base = OTHER; note = 2'-fluoro-modified nucleoside
  modified_base 6: mod_base = OTHER; note = 2'-O-methyl modified nucleoside
  modified_base 7: mod_base = OTHER; note = 2'-fluoro-modified nucleoside
  modified_base 8: mod_base = OTHER; note = 2'-O-methyl modified nucleoside
  modified_base 9: mod_base = OTHER; note = 2'-fluoro-modified nucleoside
  modified_base 10: mod_base = OTHER; note = 2'-O-methyl modified nucleoside
  modified_base 11: mod_base = OTHER; note = 2'-O-methyl modified nucleoside
  modified_base 12: mod_base = OTHER; note = 2'-fluoro-modified nucleoside
  modified_base 13: mod_base = OTHER; note = 2'-O-methyl modified nucleoside
  modified_base 14: mod_base = OTHER; note = 2'-fluoro-modified nucleoside
  modified_base 15: mod_base = OTHER; note = 2'-O-methyl modified nucleoside
  modified_base 16: mod_base = OTHER; note = 2'-fluoro-modified nucleoside
  modified_base 17: mod_base = OTHER; note = 2'-O-methyl modified nucleoside
  modified_base 18: mod_base = OTHER; note = 2'-fluoro-modified nucleoside
  modified_base 19: mod_base = OTHER; note = 2'-O-methyl modified nucleoside with phosphorothioate linkage
  modified_base 20: mod_base = OTHER; note = 2'-O-methyl modified nucleoside with phosphorothioate linkage
  modified_base 21: mod_base = OTHER; note = 2'-O-methyl modified nucleoside
tttattgcctgaagcaatgtt

SEQ ID NO: 13774 - RNA, 21 nt, synthetic construct
  source 1..21: mol_type = other RNA
  modified_base 1: mod_base = OTHER; note = 2'-O-methyl modified nucleoside with phosphorothioate linkage
  modified_base 2: mod_base = OTHER; note = 2'-fluoro-modified nucleoside with phosphorothioate linkage
  modified_base 3: mod_base = OTHER; note = 2'-O-methyl modified nucleoside
  modified_base 4: mod_base = OTHER; note = 2'-O-methyl modified nucleoside
  modified_base 5: mod_base = OTHER; note = 2'-fluoro-modified nucleoside
  modified_base 6: mod_base = OTHER; note = 2'-O-methyl modified nucleoside
  modified_base 7: mod_base = OTHER; note = 2'-fluoro-modified nucleoside
  modified_base 8: mod_base = OTHER; note = 2'-fluoro-modified nucleoside
  modified_base 9: mod_base = OTHER; note = 2'-O-methyl modified nucleoside
  modified_base 10: mod_base = OTHER; note = 2'-O-methyl modified nucleoside
  modified_base 11: mod_base = OTHER; note = 2'-O-methyl modified nucleoside
  modified_base 12: mod_base = OTHER; note = 2'-fluoro-modified nucleoside
  modified_base 13: mod_base = OTHER; note = 2'-O-methyl modified nucleoside
  modified_base 14: mod_base = OTHER; note = 2'-fluoro-modified nucleoside
  modified_base 15: mod_base = OTHER; note = 2'-O-methyl modified nucleoside
  modified_base 16: mod_base = OTHER; note = 2'-fluoro-modified nucleoside
  modified_base 17: mod_base = OTHER; note = 2'-O-methyl modified nucleoside
  modified_base 18: mod_base = OTHER; note = 2'-fluoro-modified nucleoside
  modified_base 19: mod_base = OTHER; note = 2'-O-methyl modified nucleoside with phosphorothioate linkage
  modified_base 20: mod_base = OTHER; note = 2'-O-methyl modified nucleoside with phosphorothioate linkage
  modified_base 21: mod_base = OTHER; note = 2'-O-methyl modified nucleoside
tttattgcctgaagcaatgtt

SEQ ID NO: 13775 - RNA, 21 nt, synthetic construct
  source 1..21: mol_type = other RNA
  modified_base 1: mod_base = OTHER; note = 2'-O-methyl modified nucleoside with phosphorothioate linkage
  modified_base 2: mod_base = OTHER; note = 2'-fluoro-modified nucleoside with phosphorothioate linkage
  modified_base 3: mod_base = OTHER; note = 2'-O-methyl modified nucleoside
  modified_base 4: mod_base = OTHER; note = 2'-O-methyl modified nucleoside
  modified_base 5: mod_base = OTHER; note = 2'-fluoro-modified nucleoside
  modified_base 6: mod_base = OTHER; note = 2'-O-methyl modified nucleoside
  modified_base 7: mod_base = OTHER; note = 2'-fluoro-modified nucleoside
  modified_base 8: mod_base = OTHER; note = 2'-O-methyl modified nucleoside
  modified_base 9: mod_base = OTHER; note = 2'-fluoro-modified nucleoside
  modified_base 10: mod_base = OTHER; note = 2'-O-methyl modified nucleoside
  modified_base 11: mod_base = OTHER; note = 2'-O-methyl modified nucleoside
  modified_base 12: mod_base = OTHER; note = 2'-O-methyl modified nucleoside
  modified_base 13: mod_base = OTHER; note = 2'-O-methyl modified nucleoside
  modified_base 14: mod_base = OTHER; note = 2'-fluoro-modified nucleoside
  modified_base 15: mod_base = OTHER; note = 2'-O-methyl modified nucleoside
  modified_base 16: mod_base = OTHER; note = 2'-fluoro-modified nucleoside
  modified_base 17: mod_base = OTHER; note = 2'-O-methyl modified nucleoside
  modified_base 18: mod_base = OTHER; note = 2'-fluoro-modified nucleoside
  modified_base 19: mod_base = OTHER; note = 2'-O-methyl modified nucleoside with phosphorothioate linkage
  modified_base 20: mod_base = OTHER; note = 2'-O-methyl modified nucleoside with phosphorothioate linkage
  modified_base 21: mod_base = OTHER; note = 2'-O-methyl modified nucleoside
tttattgcctgaagcaatgtt

SEQ ID NO: 13776 - RNA, 21 nt, synthetic construct
  source 1..21: mol_type = other RNA
  modified_base 1: mod_base = OTHER; note = 2'-O-methyl modified nucleoside with phosphorothioate linkage
  modified_base 2: mod_base = OTHER; note = 2'-fluoro-modified nucleoside with phosphorothioate linkage
  modified_base 3: mod_base = OTHER; note = 2'-O-methyl modified nucleoside
  modified_base 4: mod_base = OTHER; note = 2'-fluoro-modified nucleoside
  modified_base 5: mod_base = OTHER; note = 2'-O-methyl modified nucleoside
  modified_base 6: mod_base = OTHER; note = 2'-fluoro-modified nucleoside
  modified_base 7: mod_base = OTHER; note = 2'-O-methyl modified nucleoside
  modified_base 8: mod_base = OTHER; note = 2'-fluoro-modified nucleoside
  modified_base 9: mod_base = OTHER; note = 2'-O-methyl modified nucleoside
  modified_base 10: mod_base = OTHER; note = 2'-fluoro-modified nucleoside
  modified_base 11: mod_base = OTHER; note = 2'-O-methyl modified nucleoside
  modified_base 12: mod_base = OTHER; note = 2'-fluoro-modified nucleoside
  modified_base 13: mod_base = OTHER; note = 2'-O-methyl modified nucleoside
  modified_base 14: mod_base = OTHER; note = 2'-fluoro-modified nucleoside
  modified_base 15: mod_base = OTHER; note = 2'-O-methyl modified nucleoside
  modified_base 16: mod_base = OTHER; note = 2'-fluoro-modified nucleoside
  modified_base 17: mod_base = OTHER; note = 2'-O-methyl modified nucleoside
  modified_base 18: mod_base = OTHER; note = 2'-fluoro-modified nucleoside
  modified_base 19: mod_base = OTHER; note = 2'-O-methyl modified nucleoside with phosphorothioate linkage
  modified_base 20: mod_base = OTHER; note = 2'-O-methyl modified nucleoside with phosphorothioate linkage
  modified_base 21: mod_base = OTHER; note = 2'-O-methyl modified nucleoside
tgctgctgtcgaagtaatttt

SEQ ID NO: 13777 - RNA, 21 nt, synthetic construct
  source 1..21: mol_type = other RNA
  modified_base 1: mod_base = OTHER; note = 2'-O-methyl modified nucleoside with phosphorothioate linkage
  modified_base 2: mod_base = OTHER; note = 2'-fluoro-modified nucleoside with phosphorothioate linkage
  modified_base 3: mod_base = OTHER; note = 2'-O-methyl modified nucleoside
  modified_base 4: mod_base = OTHER; note = 2'-fluoro-modified nucleoside
  modified_base 5: mod_base = OTHER; note = 2'-O-methyl modified nucleoside
  modified_base 6: mod_base = OTHER; note = 2'-fluoro-modified nucleoside
  modified_base 7: mod_base = OTHER; note = 2'-O-methyl modified nucleoside
  modified_base 8: mod_base = OTHER; note = 2'-fluoro-modified nucleoside
  modified_base 9: mod_base = OTHER; note = 2'-O-methyl modified nucleoside
  modified_base 10: mod_base = OTHER; note = 2'-fluoro-modified nucleoside
  modified_base 11: mod_base = OTHER; note = 2'-O-methyl modified nucleoside
  modified_base 12: mod_base = OTHER; note = 2'-fluoro-modified nucleoside
  modified_base 13: mod_base = OTHER; note = 2'-O-methyl modified nucleoside
  modified_base 14: mod_base = OTHER; note = 2'-fluoro-modified nucleoside
  modified_base 15: mod_base = OTHER; note = 2'-O-methyl modified nucleoside
  modified_base 16: mod_base = OTHER; note = 2'-fluoro-modified nucleoside
  modified_base 17: mod_base = OTHER; note = 2'-O-methyl modified nucleoside
  modified_base 18: mod_base = OTHER; note = 2'-fluoro-modified nucleoside
  modified_base 19: mod_base = OTHER; note = 2'-O-methyl modified nucleoside with phosphorothioate linkage
  modified_base 20: mod_base = OTHER; note = 2'-O-methyl modified nucleoside with phosphorothioate linkage
  modified_base 21: mod_base = OTHER; note = 2'-O-methyl modified nucleoside
tgctgctgtcgaagtaatttt

SEQ ID NO: 13778 - RNA, 21 nt, synthetic construct
  source 1..21: mol_type = other RNA
  modified_base 1: mod_base = OTHER; note = 2'-O-methyl modified nucleoside with phosphorothioate linkage
  modified_base 2: mod_base = OTHER; note = 2'-fluoro-modified nucleoside with phosphorothioate linkage
  modified_base 3: mod_base = OTHER; note = 2'-O-methyl modified nucleoside
  modified_base 4: mod_base = OTHER; note = 2'-fluoro-modified nucleoside
  modified_base 5: mod_base = OTHER; note = 2'-O-methyl modified nucleoside
  modified_base 6: mod_base = OTHER; note = 2'-fluoro-modified nucleoside
  modified_base 7: mod_base = OTHER; note = 2'-O-methyl modified nucleoside
  modified_base 8: mod_base = OTHER; note = 2'-fluoro-modified nucleoside
  modified_base 9: mod_base = OTHER; note = 2'-O-methyl modified nucleoside
  modified_base 10: mod_base = OTHER; note = 2'-fluoro-modified nucleoside
  modified_base 11: mod_base = OTHER; note = 2'-O-methyl modified nucleoside
  modified_base 12: mod_base = OTHER; note = 2'-fluoro-modified nucleoside
  modified_base 13: mod_base = OTHER; note = 2'-O-methyl modified nucleoside
  modified_base 14: mod_base = OTHER; note = 2'-fluoro-modified nucleoside
  modified_base 15: mod_base = OTHER; note = 2'-O-methyl modified nucleoside
  modified_base 16: mod_base = OTHER; note = 2'-fluoro-modified nucleoside
  modified_base 17: mod_base = OTHER; note = 2'-O-methyl modified nucleoside
  modified_base 18: mod_base = OTHER; note = 2'-fluoro-modified nucleoside
  modified_base 19: mod_base = OTHER; note = 2'-O-methyl modified nucleoside with phosphorothioate linkage
  modified_base 20: mod_base = OTHER; note = 2'-O-methyl modified nucleoside with phosphorothioate linkage
  modified_base 21: mod_base = OTHER; note = 2'-O-methyl modified nucleoside
tgctgctgtcgaagtaatttt

SEQ ID NO: 13779 - RNA, 21 nt, synthetic construct
  source 1..21: mol_type = other RNA
  modified_base 1: mod_base = OTHER; note = 2'-O-methyl modified nucleoside with phosphorothioate linkage
  modified_base 2: mod_base = OTHER; note = 2'-fluoro-modified nucleoside with phosphorothioate linkage
  modified_base 3: mod_base = OTHER; note = 2'-O-methyl modified nucleoside
  modified_base 4: mod_base = OTHER; note = 2'-fluoro-modified nucleoside
  modified_base 5: mod_base = OTHER; note = 2'-O-methyl modified nucleoside
  modified_base 6: mod_base = OTHER; note = 2'-fluoro-modified nucleoside
  modified_base 7: mod_base = OTHER; note = 2'-O-methyl modified nucleoside
  modified_base 8: mod_base = OTHER; note = 2'-fluoro-modified nucleoside
  modified_base 9: mod_base = OTHER; note = 2'-O-methyl modified nucleoside
  modified_base 10: mod_base = OTHER; note = 2'-fluoro-modified nucleoside
  modified_base 11: mod_base = OTHER; note = 2'-O-methyl modified nucleoside
  modified_base 12: mod_base = OTHER; note = 2'-fluoro-modified nucleoside
  modified_base 13: mod_base = OTHER; note = 2'-O-methyl modified nucleoside
  modified_base 14: mod_base = OTHER; note = 2'-fluoro-modified nucleoside
  modified_base 15: mod_base = OTHER; note = 2'-O-methyl modified nucleoside
  modified_base 16: mod_base = OTHER; note = 2'-fluoro-modified nucleoside
  modified_base 17: mod_base = OTHER; note = 2'-O-methyl modified nucleoside
  modified_base 18: mod_base = OTHER; note = 2'-fluoro-modified nucleoside
  modified_base 19: mod_base = OTHER; note = 2'-O-methyl modified nucleoside with phosphorothioate linkage
  modified_base 20: mod_base = OTHER; note = 2'-O-methyl modified nucleoside with phosphorothioate linkage
  modified_base 21: mod_base = OTHER; note = 2'-O-methyl modified nucleoside
tgctgctgtcgaagtaatttt